United States Patent Application Publication US 2026/0191916 A1 - sequence listing, part 23

SEQ ID NO: 40 - DNA, 7086107 bp, Bacteroides cellulosilyticus (residues 5,314,582-7,086,107 of 7,086,107)
  source 1..7086107: mol_type = genomic DNA
tttgagtttttcgttatgttccctgatttcttttctctttttggtatagacttccgttatagttctcatgagtcttgataccagatttgaatccagttttccttccattctcttgaccaatgtggctgtagatattattccatcactcactattttagccatttcagaaagatatttcatagctttcctttggttggtgttcagatgtactgagagtcctttcccctgcaggaggttgcgtacataagtcgcactttttcctatcgcggctagtatttcaggccttgtagccccttctattgtcatttgctttattttcaaatagttatttattctttccctatgccttttctctcctatgtcacacaaatccttaaacatatagtcataagcttcctctaatgaaggatagggataggagagcttttcattcgtctgataaagcgtcttttgaatgaattcagtcattcctttaagcaggttcttgaccaagtggaagcggtctgtaacctgaatcgctcgcggaagatgagtggatatggcccgtgcgtagtcatgagaaccgtcccgggttacaagctctatctgctggttttcttgcaaccattgattgagttcctcaccatagcggcagtcaaagatagccactggaaatcccgtatcctgatcgcatgccacacatttataaacatgcccttttttactggcaaaatcatctattccaatacgtgtacttgtgcatggagggtttgattcacccagacgcttcaccactctggtacacccggaggtactggcatggatattttgggatttcaaaaggagggaggcttttcgaccggacaggtacagcgaagtcttaagaatgcgctgttgtacttcatgagtcttgcgagcattagggccggctatggcaagggaaccggaaaatgtacgctggggacagtccggataatcacaataatagtagcgtactcgcacctgtattacaacttgcaaattaaaaagctccaggctttccaaagtccgaatgtagtatttgtggacatgatagcaaagtctaccacagtttgggcaggagcaactttgagaatgggtatcagcatgtaaagtacagcagcaatcagaaaattcaatattacgaatgagtaatcctttatccgagaatttatttttgaaccatttgcttatttgacaatagaggccactagttcgcttttttgtactatctttgtcttttgcagatatgttaatcatttggtaacttgttgaattgaagaaccataaagttactgaaataattacatatctgcaatcttaaacagataatatatcactgtatatcagattattaacaataaaatatcgctttcttattttattcattataacagattttaccaccaaaagtgacgaagaaccaaaaaacgttgttaattatcaacgcgtttccatttgcgtacttcctccacggtactggttttggtaggactttcatctactttttctgtgtgatctatttcataatgataatcacagtgtccgcagttcgtttcctgatgataagtaatagtacctgtccaatactcgtggcttgacactatgtccttgctttcatagcgagtttcccattctacaaaatcaaagcctttgtccttgattttcccttctttccgtgaagtatactcatggcgtttcacatttgaatcttttaccagcgaagtagcttttaaagcatgctgtccgcacttagggcatgcaaactctttgagaggcttccagtcattcaccgaatcagtctcactatccgtatgtgtgtggtgatgacaaacggcacactctgtatcggtttccaccaagtgatgttcccgtctacgtgctttttccacatcaacaagtgtattctttatccaacttgtcccccatacaggctccacgtccacacctgtcaaataagtgatttcaactacatttaatttattaagtgccgcgcatgacgggcaacgggcgtcacgaatggagagtttttctacagcagcgcacatccatatcagtagcaatacgcctcccggcaaaagaattatccaaagagaattgaataagtagagacaggaaagcaacaagatatacatccaagggatcatgtatacatattccagtttggcgataaacgaatttttcactcccggcatgcgccccagtgcaacaaacaggagacttgcggctccatacactatcagcgtcaatccgcccaatatcaataagaacagtatcagcttcatgagaaaccagaaaatggaggagaaaatccccttaaaccacgaaccgaatttactgcttaaggatttgtggtgcagtggctgactattagcgtctaccgtaaagggctggaagttcgtgacaagattccaactaattatataataaaagaagggtgcactcgtgtataagttatattttaactccgaggtgcgttctgtatgtatcacaagtccctgttcatctaccgtgagtaacactcctttcgttcttccttcccctttggccagcacaatttgcggaaaataataactgcgtgtcgatacatcggccatcaaatagtctccggcttctttgcgtatacgttctaatgagaaaccggtcaatgaatcggctcgataaacatagcggaaatcgggattcatagctcgcagctcctttacttcaccttcgacagccaatttgggcacgccaaagcggttgccgttttcatcttccacaatccatgtccaacgtccatcttcggcaatgcctttcaggcttgtaccggcttttaatgtttcgttggtttcttcaagttttccactctcaccagaccatacatatatccatttataacagtcttccttcaacacaatcttcacatctttttttgccagttctcgtgaaggactccagaaaagaaaaaaacaaaacaataccaggcatactacaaaagcaataagacttttcgttaaagaagtcgtcttacaatactctcttctttttaattcttctttcatataagtactcgttattaattagtctgtactatctcaattcccctcctcctgggaattgagatagtataagttatttcttgcttattacttagtctattttatttattgttataacctcttggggaaattaatatctttcttttcggttatgaatcagttacaagctacgagctacaagtgcctttcggaatatagcgcagctacttgtagcttgtagccggtagcttgtaaccatacctcgtgagcttgaaaatgttatttattgcaaagaaaatcttttttttatggaaagcaaagggataatagaaaaaaaatagggcgaagcctccgccccgccctatctcctttgtgatacttgtagattaattaaagaattccctttactgtttccagcatacctttttcctgaatagaatccagatcagctttcacagcagcggtaagtcccgggatattattcaaatcttcgccccagatagaagttgcagcaagtacaccttcggttactttctgggtatcgcctgttgcccacaggtctttcagtaattgcatgatttccggagcatcgttcggggtgatctcagcaccgtcttcacgaacaccgcctttataataagtgatgatagcggccaaaccgagaaccagtcccttaggcaattcacctttgcgttgcagataagtcttcaagccaggcaggtcgcgagtttcatatttcgggaaagagttcagcataatgctggtaacggcatggtcaacaaacggattgttgaaacgctccaatacatcttccgcaaacttcttcaactcatctttcggcaagttcaatgtttccatcaactcatcgaacattaccttattgatgtactgaccaataaccggatgttgacaagcatcacgcacaatgtttacgcccgacaagtaagctaccggagaaagaacagtgtgaggaccattcagcaacgttacttttctttcgtgatacggtgcttcagaaggaacgaacaatacattcaaaccagccttgtcagcagggaattctttggcaatctcctgcggagcttcgataacccaaagatggaagatttcggcctgtaccaccaaattatcatcatactgtaatttttccttgattgctgcaatatccttgcgcgggaatcccggaacaatacggtcaacaagcgtagcgtacacaccacatgcttcttcaaaccaagtcttgaattcatcacccaattgccataattcgatatattggtagatggtttctttcagtttgtgaccgttcaggaagataagttcgcaagggaaaataattagacctttgctcttatcaccgttgaatgtcttgaaacgatgatacagtagttgagtcagtttgcccggataagaagaagccggagcgtcagtcagtttgcaggagggatcgaaagcgataccggcttccgttgtgttggagattacaaaacgcatttccggttgctcagccaacttcatgaattcattgttctgagtgtaaggattcagtgcacggctgataacgtcgatcattgtcagactattgacagtttctcctttatccaatccttgcaggtttacgtgataaagatcatcctgtgcattcagcatgtctaccatacctttgtcgatgggttgaactactacaacactgctattgaagtcagttttttcgttcatgttataaataatccagtcgataaatgcacgtaagaagtttccttcaccgaattgaatgatacgttccgggcgctgagccttgggagcggtctgtttgtttaatgctttcatgcttaaaaatcgtttttaaagtgattgatattatgatgtttattcaaattcaaaatagaaattgatgttttctttcatcaggatgtcgataggcatatactttacaccggtcaccggacgtttgaatacgacatggtcgcacagagcttttacgccacagtatccttgcagtcccggtcgttgtccgatgagataatttacttcgccggatttcaggtactccacgttcttgggcagaaggtcatatccaactagtccttccaaatggtgtcctgtttcctgtagatatcctgccacctggtagacacgtgagttaaaaacggctcctaatactgccttgggatgtgcggcaaagaaatcttccaatgtccggcggttggcttcatcatcttctttattcagtactacgtcatgaaccaccagattctcatgttcttgtgcaataaaattcatgaaaccgtccatgcgtcgttgcatctgtatttctgccggactattctttttattattaagaaatagtatcagctcctgcccttccttgtacttgcgcatcaggattttagcagccatatacccgcttgtttgggagtcctggccgatgtagcagagtgcatgggtatcttctatattaaagtcgacaaatgcgtaaggtatctttttcccttccagataagatgtcagcgacattgtctcttcacggaaattgggggcgatcaatacggcatccactatttctttgcggagcttcgcgcaggctttttcataagaaagccggtcggcatgatggtagcacaaaaagtccacgcttacattaaaaggacgcaactcttgtgcggcacggttgatgccttctgcaacggaatgccaatagtcatgttccatataataaggtataatacacagaacacggtagcgcttcttggctgccaggccaatggcaaacatattaggatgatagtctatctcatcaagcactttttgaaccttctccctgctggcagcagaaacatctccccgattgtgcaacacgcggtccacagttccggcagaaacacccgccatgcgggcaatgtctttaatggtgtagttcttgttttccatattctttgtctcattcgttttaaggcactaaaggttcaatgtctaaaacttaaatattataaatatttgcggcaaagatacgaattattttgtttctccaagtaaattttctacttttgtgttcgataacggttaataaaagcaaaaaccaatatcttgcctattagctttacaatcaatactatataggtatagaaaagagaaagtaatatttttatatacttaaaacacagtagaatgaaaaaatttatggatgaaaacttcctgttgcagacagaaaccgcacagaagttgtatcatgaacatgcggccaagatgccgattatcgattatcactgtcacttaatccctaaaatggtagcggacgactatcagtttaagtcattgactgaaatctggttgggcggcgaccattacaaatggcgtgctatgcgtaccaatggtgtagacgaacgtttctgcacaggcaaggatacttccgactgggaaaaatttgaaaagtgggctgaaaccgttccttatactttccgtaatcctttgtatcactggacacacctggagttgaagacagcgttcggtatcgataagatcctgagcccgaagactgcccgtgagatttatgacgagtgtaatgagaagctggctcaaccggaatactctgctcgtggtatgatgcgccgttatcatgtggaagctgtttgtactacggatgatcctattgactctctggaatatcatattcaaacacgcgaaagtggttttgaaatcaaaatgttgccgacatggcgtcctgacaaggcaatggctgtagaagttcctgctgacttccgtgcatacgttgagaaactggctgaagtaagcggtgttgctatctctaatttcgatgatatggtagctgccctgcgcaagcgtcacgacttctttgctgaacaaggctgtaaattgtctgatcacggtattgaagaattctacgcagaagactatacagatgctgaaatcaaagctatatttaataaggtatatggtggagcagaactgaccaaggaagaaatcctgaaattcaaatcagctatgctggttatcttcggtgaaatggactgggaaaaaggctggacacaacaattccattatggcgctatccgtaacaataacagcaagatgttcaagttactcggtgctgatactggtttcgattctatcggtgaatttactactgctaaggcaatgtctaaattcctcgaccgcttgaattccaaaggcaagttgacgaagactattctttataacctcaatccgtgcgctaatgaagttattgccactatgttgggtaacttccaggatggcacgattccgggtaagatacagtttggttccggctggtggttccttgatcagaaggacggtatggagaaacagatgaatgctctttccgtactgggtctgctgagtcgtttcgtaggtatgttgacggactctcgttcattcctctcctatccgcgtcatgaatatttccgccgtacattgtgtaatcttgttggccgtgatattgaaaatggtgaaattccggcttctgaaatggaccgcgtgaaccagatgattgaagatatcagctactataacgctaagaatttcttcaagttctaaaagaagaattactttttactcatagcaaggagtgcatcaaagttatattgatgcgctcctttttttaatacgcatccatcgcttcgcttcttttaaagataaaatgcgtccaaattggataccaatttcctttttactatatttgcatataaatcccataaaacagaagattatgataataattagcacaagagatttcagagccaatcaatctaaattcatggatatggctaacaatggagaggacattattttgaagtcccgtaaaaacggaagttttaaacttgttccggtaagtgaaagtgatatgctgataagcaaagaatatattcttgagccagatgcagatcttgatcgggctataacaatggatgaacttcttcaaggtgtaaaagcagacattcatgaattgttcagggataaaaggaagcaagaataatgaaagtaatagcattaccagaggtgagagaatacctcatggagctgattcagattctctataaaaaagaatatttcggatttgaggaaaatgcacaaaagtacgtggaagaattgattttcgatataaaaaacaaccttccgctaaagctaaacaagccggcacctccctattttgacaggtacggaaagaagatgttatacgctacgttccggaaaaataaggctacacaatggtatgtatttttcagtgtctatcagaaagacggtgaaatgatttttattatacgctatatcagcaataaccatgtaacagcgcaatatttataaagcactctaaaactatcgcatcactcacctgactactacggcagaatgacattgtttcttcttaattctggtttgtaaagatgttgccttgagcataaacatcccggaaagaagagttactttttacccatagcaatgcatcaaagttatattgatgcgctccttttcttttatatatatacaacgcttctttaaagaatgatgttacttacatgcacatgttggcactatcaacacccggatgttagcatcattaacatatacatgtcaatagcactaacatgtacatgtaagtaataccattctttaataataatcgggcatatcctttaactttgcatgagatattatatatatgggagagaaaatttctctatgttattggcttttataaattattcattaactttgcgacacctttaggaatattctgatatactcctaaaaggttacatattaaatagttagaagcgtttaccatattattcttgtcaaggaaatcgccaaatttcaaatggatataagaataataggcaacaaaacgctcatgctcgctgtatatccaaatgtatagtagggcgtgggctgttgtctttattatctatatccgggtgtttggcgatacctcttgacagataatggcagcagttcccacgctttcattttatttataggtgtcgtatggggactttcggcaccggatatacccgatgagaaataccatatctgtcttatgtgcggcaacttttctgtgcctgctctgttcttcctgttcatcaagcaggcaagtatcctatttgcaaaagctgaatgagggattccgggacactcttatagaatatgatgcccgcatcatgcctaaagatttgcttaccatctccgtcagttgttctgaaccggaagccgccttgcctttcaatttagtggtacctgcttcgcaaacaggaatcaattccactaatttagtttcacaacctaccctgcaaaactatctggtgaacaatcagggcgagatcgttttccctgtactcggcaccttgaaagtaggtggaatgaccactcaggaaacctctgaactgattgtggggaaactggaacgctacttgaaagagcgtcccatcgtgactgtccggttggtaaactataagatttccgtaattggagaagtaagccgcccgggagtctataccgtaaataacgaacaggtgaatgtctttgaagctgtagcaatggcgggtgatctgaccatatacgggaagcgggataatgtacgtatcatccgcaccgtagactgcaaacaaaaacttatcaccatcaacctgaatgatgaaaacatcatctattcccccgacttttatctacggcaaaacgacatcctctacgtggagccgaacaaggcgaagaaacagagtgccaacattggttcttccaccaatcttctgatttccataacctctatacttatatccctggcggggttaatggtcaatattttacgataaaaagtataattcactaactaacacaatctatatatatgaacaccaatcatacagacactaatcaaatgcaggaacaagaaatagacctgattgaactattctacaaactgttggcgcactggcggtggtttctgctggctgctgtggtagcacttgccggcgcatacatttatgtacatgtaactactcccatctatcaggcgacggcttctgttgtcatcaaggattcggaaggaagcaataaggccattgatgagctatttcagaaagtcgctccttcttccctcacctctgcaaatacgcagattgaagatgaaatggagatattgcgttcacgctctatcctgctgcaagtgattaatgagctgaatctgcatacgaagtacaaggtgaaagatggacttttctataatgaaaccactacacctcccatcattgcttctatggataaagcatccatggatacattgagcgggacattgctgatacaagtagagaaagcaggtgaacgttatgccgtgagcagcgccttggacgatatttgtgtaacggagactttcacaggtttccccgcttttatagaaactcctgccggacgatgcactctaagattactgcccggacatcagttttccgaggccataaagataagtatttgccgtcctatcgatgctgtgaacgattattccggtcagctggtggtcactactacctcaaagaaaacttctatcatcagtctgaccttcaaggatacggataagaatcgtgcggaagcttttcttgccaagttgattgaagtctacaaccgggatgcaatggatgataagaataaggtgacaggaaatacactcatctttttggaagaacgtttggacagtatcagcaacgaactgggatttgtagaaaagcatctggagcaatacaaacaaaaagaacgtctgagcgatttgaaaaccaatatgactctggatctgaatacaaacaatgaatacgaaaagaagttgctggatgtggagatgcaactaaatatgactaactatatttataattatttgtcggatgataaacaccgtttttcgctattaccggtgaatacggggattgccgatacggaactggtgcaactgattaacgaatataacaaggaactgctggaacgtgaacggctgatgaacaccatgaaagcagataatccgacggtggtaaatcaggatattcgcattgatgcattgagaagaaatgtagtaagttctgtggtcggtgtgaaagacggactgagcatagcacgtactgatattctgcgtaaaaccgattatttcaactcccgtatcggaaatatgccgaagcaggaaagggagttcaataacatagaccgtcaacagcaaattaaggcaaacctatatctgatgttgcttgaacggcgtgaacaggcagctatttctttggcagccacaatgaacaaagcaagagtgattgatgctcccctatccgctgacagaccgatagctccgcgaagtatgatgatctatgccggaagtctgtttctggcatgtgcaatgacggcaggagtgattttgttcggaggcattttccgcactaaaataatgtcggtagcagaagtagagagtacacaaatttctgtaatgggaatcattccgtataccaaagaaggtggtggggttgaagaaggacaaaacggcatcatggaagaatcttttcgccgcatgagaagcaatctgcgttttcttactgaagacggtgacaaaaaatgtatcctgatgacctccaccattagcggagaaggaaagagtttcatcagcatcaacctggctctgacctttgcttttctgggatgccgggtactggtagtaggtctggatatccgtcgtcccagactggcggagtatttcagaataaagagtcatgtaggtatgaccagttacctttcggacaatgagataaaaccggaagatataatcttcccgtcaggagtacatgagcaattattcgtcgcacctgccggacctatccctcctaatccggcagaattgttggaaagagcccgattgaaagaggcatttgcgtatttccgtgaacagtttgattatatcattgtggactcggctccggtggggttgattagtgatacattgagcttgagtaaagtgactgatttcacactctatgtgtgccgcatgaattatacgcacaagaatgtgttgtctgaaattgtcgagatacaacgatcagggcaactaaaccaaatatctttagtagtgaatggtggtaatctggcggaaaagaaatatggttacggatatggctacggatatagttatggttacagagatacttataaaaagcataagtaatatacactcatttttttcatctcacttttttttcttctcaatgaagatactgctccggactttcataagttaggtaaagtccggacggtattttctaaaaccaccacttcttctttttgttctgttccgcagggatattgccttgcgtatagatatcccggaaggttttacgttctttaatcatctgatagataagtccccaatcgggcaatccgcccagattacggtcatcaatgaaaaggtctactttcaatttacgggagaatccacagtcctgctgcttttcttcgggataatcacgattgacagcatagaattccactcctctttctttgcaccaggcaacggcttcttccagaagttcaccttcgcgcacactccacaaaataagcctgtgctgatcttgttgcaacagttttaaagtgtctgttgcaaaaggaatttctctaccgatacggggatagcgatgttctactatagttccgtcgaaatcaactgctattgtcatagttttatgctgaaaaattacagaacaaagatacgaatcttattgaaaaaacaaagcgttctctcccttttacaataggcaaatatgaaagaaatttgcatataatttcataaaaatgtatttttgcgcttaatttttcactaacaacataatattaggatgactcaatcacccaaaaatgtatctaaagggttcactaaagccttttgggtaagcaacacggtcgaactgttcgaacgtatggcgtattatgccgtttttatcgttctcactatttatctttcttctattttaggcttcaacgaccttgaagcgagtatgatttccggtttattttccggtggtctttatcttttgcctatcttcacgggtgcttatgctgataagataggtttccggaaatccatgattgttgctttttcgctgctgtctgtcggatatctgggtttaggaattctccctaccctgctggaagctgccggtttggtggaatatggcaaagcaacccgtttcaccggactgccggatagcgatagccgctggatgatcgttcctgtgttgtttgttatcatggtaggcggatcgtttatcaaatctatcatttcggcttcagtggcaaaagaaactacggaagcaaaccgcgcacgcggttattccatcttttatatgatggtgaatattggtgcatttaccggaaaaacagtgattgatccgttgcggaatgttattggagatcaggcgtatatctatatcaactatttctctgctacgatgacgatattggcattgctttccgttgttctgctctataaatctacccatacggcaggtgaaggaaaaagtatgcgtgaaatcggccagggcttcctgcgcatcataacgaactggcgtctgctgattcttatcctgattataacgggattctggatggtgcagcaacagttatacgctacgatgcctaaatatgtaatccgtatggcgggtgaaacggccaagccgggttggatagccaatgtaaatccgtttgtagtggtttgctgcgttagtttcgtgacgcgtttgatggcgaaacggtcggctattacttccatgaatatcggtatgttccttatcccattctcggctctgctgatggcatgcggtaacctgcttggaaatgacgtgataagcggaatgagcaatatcacattaatgatgatagccggtattgtgatacaggctttggcagaatgtttcatttcaccgcgttatctggagtacttctccctgcaagcgcctaagggtgaagaaggtatgtatcttggatttagccatctccattccttcctctcttccatcttcggttttggtatcgcgggagtattgttgacaaaatactgtcccgatcctgtcctctttgagactcgtgaagcatgggaggctgccagcaccaatgcgcattatatctggtactatttcgctgctatcggtctgatatctgcactggcactgttagtatttgccaaaatcacccaatccatcgacaaaaagaagaaagccaaggtctgaatatctcattttttatgtatatttgccgtcactttgccataaaagtggcggctttttctaaattgaggagaacataatgaaagtaaaatttataagccttgcgagcggaagtagtggcaactgctattatataggcactgaaaaatacggaatacttattgacgctggtatagcggtacgtactattaagaaatcattgaaggaggtgggcatcggtatggaaacaatacgcgcggtatttgttacacacgaccacgcagaccatatcaaagctgtaggcggactgggtgagaaactgcacatccctatctacacaactgcacgtatccacgaaggaatcaacaaaagttattgcatgacggagaagctccactcttccgttcattatctggagaaggaagaaccgatggtactggaagatttccacattgagtctttcgaagttccccatgacggtacggacaatgtgggttattgcattgaaatcgacggaaaagtattctcgttccttaccgaccttggtgaaatcacccctactgctgccaagtttatccgtaaagcgaactacctgatactggaagctaactatgatgatgaaatgctacgtatgggtacatatccgcagtatttaaaggagcgcatcaccagccgtacgggacacatgagcaatattgcaactgccgagttcctggctgaaaatatcacggaagatctgaaatatatctggctttgccatttgagcaaagacaataatcatccggaacttgcttacaagacggtggaatggaaattaaagagtaaaggtatattggtaggtaaagatgtgcaactctgcgctttaaagcgtagcactccctccgacttgtacgagtttgattaaaaaaagccgctttcatcgaaaaaaagattttattttgcttggatgaataaaataaaaggactacttttgcacccgcaaataagaaaaacgatgcactcttagctcagctggtagagcaattgactcttaatcaatgggtccagggttcgagtccctgagggtgtacgaagataaggttctgaaaacaattgagtttcagaaccttttttatcgtcactggatgtgactttgctactagactaaaagaatcttgaaaatctcccgtatgtagatgcaacaacaggaggcatttatctgtttttcattatatagtttcactctcatcatgaataattggaagaaaaaatttatcataatatggagcgggcaactattttctatattaagtagttccatcgctcagttctctatcgtcttatggattagtctcaaaacgggttctgcggaagttttgtcctttgccatgattgccgccttgttgccgcaagccttgttaggggcatttgcaggcgtatatgtggatcgctggaaccggaaatggactatgataggtgcagatagtttcgttgcactctgttccggtatcatcgctttgttattttacctggatattgtggaattgtggcacatttatatattattggcacttcgttccattggtggttcgttccattcaccggcaatgaaatcatccattccattgctggctccggaaaaggaactgacccgtattgcggggattaaccaggctatccagtctatttgtaatatcggtggccctgcgttgggagcggttctgcttctggcattcgatatgagtgtagtcatgttattggatgtggcaggcgcaatcattgcctgcacttccctactgtttgtttacattccgaatccgaagaaggaaaatatctctgctaagagtgtattgaacgatatgcgcgacggtttccatgtgattatgcgcaaccgaggagttagttgggtgatggttacagaaatcctgattactttctttgtgttgccgatagtcgccttgatgccgctgatgactctgcatactttctccggaacagcttatcagattagtttgatagaaacacttttcggggcgggtatgttggctggagggactttattggggatttggaatcctaagatcaggaagatactgatgatcgcgttctcttatgcggtacttggtctggcgttggctatatgtggtatgttacccggcaatgggtatgtcttttttgccatactgacggtggtacaaggacttatcgtgccatttttatccggtccctttaccgctctattgcagacgcagttcaagccgatttatctaggacgtgtattctcgcttttcgacagtataagtttgttcccttctatcatcggtttgcttgtcacaagctttgtagctgactctttgggaataggcaacatatttatatactgtggttttgccattgtgctgactgcaattttgatgatgtgtattccttctgttagaaatctggagaaagaggagatcaggaagaaaaagtaaatagtattattgcgcgtctatacctctttttttcagcatctcaaagtcttcttttcccattcctatatcatccagtggacgcggttcattatgatcgttcagataaaccctcgatttctctgtatagagagggctggtgacagatagactgtcattgcgatacgaagtttctattccggccagttccatcatggtctggaaaaaagaaatactggaagatatatttttctgccggttcatcgaagcagctttctctatcccgggatactcttccctataactgtcggatgtccacagcaggaaaggtacgtgtagctgataataggacggaacgggggatgcatgaagaaacaggtgtcgaccatcgtcgaagatatcttccccatggtcggacgtgtaaagcatactggcatctacttgctgctcctccaataggtggatgatacgtgccaggaaattatccgtataccgaatggaattatcgtaggcattcatcagattatctctgtatttcacttctgcatctacggggaaatccggcaagaagaaagcagcagcttccggataacgttcccggtaattgaagtgagatccataggtatgcaatacaatgagctgtttccgatttcctttctcaagttctttttctaccaacattaacaggtcgtcatctgaagggttatattgcgaatcctgggaatcttccttgataaaatcataagtatccgcttccattccgaagaagtcgatgaaagaatggttataccgctggtttgagaagaaagctgtttggaaaccggcttctttgaaagcggtaatgatacttttccgataataaatggaatcgaaattctgtgcagaaacaggagaaagtagcattggtacactcttgtgcgtagtattcgattccgtcagaacatggtagaaagaggtcactccttctattttagaaagctcagggttcgtatcccgatcatagtcgtaaagactccagttcagggcgcgggatgtctcgcccactaccataatataaatttcgcgcctgtcttccggatgggaaggctgggcgttaaaagtaaagttctctgatgtgcggtgatacgtccttgtttgggcattacgctggaatgcgagtgctacattgtaacacacgttggccggatacaaatccgacttcagctcgtaacgtttatccagtccgtaagcggcgcccaatgagataaaaccaatgaataaggcaatccatgcctttttccgttcccgacggataaattccggagataatttccgtttctttataatggagattacagccagaatcaatgccggtatataaaggataatcacactcactaatgccggaacaagattatccagtaactccatggcttcactcgaattagtggttaccaggttcaggaacatatccacagcaataatggactgtccgaagagataaagcagtactatctggaaagctccgaagaagatgaataggaaaaggatccagaacatctttccacagtttctcgacaaagtcattaatagataatagaaagcaaatggcaacagtacattgcacacttttgccaccacaggcatcggctctgtaaaacagaggatgacattgggtactatcaggatcaacaggaatagatagaacaaatgctcctgattttccaaccatttctttatgtttttaaaaagcttcattgatgttgaatataaatccggtctggccttttccaaaccctaaatctaaccttacgtttactctctttttgaactcccaccgataaccaaaaccataattagggaggatatgtttaacttcgaagccggagaatttaggaaatacggttcccgctcctgcccatacagctacgccatttcgcctccagacgtgctggcgaagttctatctgcgcatccatggcacatttatcacggtaacgcccttcgtaatagccacgcatagaataagaacttcccaatgttgccatcaatccccaaggcggattaccgtaattcagcaacgtatggaattgtccagccaatactccccctttccatacaggatgataatagctggtagtcagctctgtgctactgaaagcatatttattaccgaggaatgcggggctgaatcgttggtctattctcaggtaatagccactataggcatttgtgaggaaatcccgtgaatcatagagtaatgagaatccgaggcttatattggtagtccgtgctttcattccttcccacagttcgggcttttcaaaatcgtggccgtagacataatcaaagacagccatcgggccgatatagaagttccgcgctatacgagtcatgaagtctacctttacttgtgcctggaagcggtcgtaatcactttcattatcgtcattagaaccgttttcatatccttttccccaatacagactggggaacgaatagaaataaagattataattcagacggtatttgtcttgtggaaagagatgatttccacgtacacccaacaaatagaaacctaccgtagatacatcaccgtataaagatacattagatggcggaaggatggtatcattcaggtctgtacgatataatccggcggctacaaggccgataccaaacttggtgtcactggaataatgaggccctccgataacgctgaagtcaaacttcttgttttttttctctttgttggcatcattaaaatagtccaggaattttttgaagaaacttttcttttgtggtaaagtgtcagttatggatacagaagattcgactgaaacatctgttcctgtggggccttgtgcccatatatcggtggctattatcaataacagtaccggtaatgtccatttcgttagtttagcgtccatgattatacctgcagaaaactacgtcggcaaatttagttttatttttaatcatatgataacaataatctgtagtattttgttcaaacttcttcctttaagaaaaaaggatgaagaaataagaatttcagaactttattcccattttaacgttattcttttagaacgaataacgaacttcattatgaaaacaaaaatggatattcccgataaagagggacgaaaacgacttgtgattgtgggtggtggcttcggtggattgaagttggcacgcaaattgagaagtgataaattccagatagtgttattggacaagaataatcatcatattttccaacccctactctatcaggtagcaaccgccggtattgaaccgagtgcaatttcttttccttaccgcaagatatttaaaaagagaaaacatttccatatacgtatttgtgaggcacaacggctaattcccgaagataatattctggagacttccatcggagctctttcatacgattatctggttgtctctaccggatgccgtaccaactattttggtaatgatgggctgtctcaacggacaatggccctgaagaacactgcggaagctttgtttaatcgcaaccagatactggaaagttttgaaaaagcacagaataccagcaacctggagaaaagaaaacgtctcatgacatttgtcatcgtaggtggtggcgccacgggtatagaactttccggtgcattagcagaaatgaaaaaatttgtgcttccgcaagactatcccgatcttgatatgaacctgatgcgcattgttcttgtggatggtgctccccgtctgctctccgctttctctgaaaaatcttcggaagaagtggcaaattacttattaaaacgtgaagtggagattataaccagtgtgcaggttacgaattatgagaatggaacgatgactctgagtgataacagtaccttggaaacgatgaatgtcttttgggttgcaggtgtacgcgccaacagcatagagggacttgcaaaagaagcctatggtcccggtaaccgccttcttgttgatctctacaactgtgttcagggttataacaatatttttgctatcggtgatactgcacttatgatttccaaggaatacccgaagggacatccacaagtagttcaaccagccattcagcaagcccgtaatctgatccagaatctggatagaaaggaacgggggcttgaaatgcaaccttttgtttatcacaacaaaggttccatggctaccataggacgcaatcacgcagtggtggaactgaaaaaccttcgtttcggtggttttcccgcgtgggcagtatggttattcattcacttaatgagtattgtcggtgtaaagaaccgtctgtttatctttgtagactggatgtggagttactttacgtacgatccttctttgcgggtaattataaaacctttgcgtagagataaaccataatgccctatttttcgttatattaaatataaatgtttaaaacgaacgactatgctttacaaatttttattcccgtctaaaccggatggagcagcaacgtctgctatattattaatagtgagaattatatttggtgtgttactaatgaaccatggtatcgagaagtggtccaattatcaggagttatccgctgtatttcccgatccgctgggtgtgggcagtcctctttccctgggattagccatattcggtgaattggcttgttctatggcatttatcattggtttcctttaccgtctggcaatgctgccgatgatatttacaatggggatggcattctttgttattcacggaaacgatccgtttgcggtcaaagaactggctttcatatatctggtggtatacgtactgatgtatattatcggtcctggaaagtttgccgtagaccactggttaggtaaggctttgacccccaaaaagccttaattttactggggctgtttaactgaaaaattgtttttgtctcttatttaagtgtatttttcacaaaaagcacttatatttgcccgaagaaaaagagcaaagagttaaatcaataaactcagtaaaacaaaagaaagtaattatgaaaaagagtaatttgaatttggctgcaaccgtgatgatttgtggcgcatttcttttcagttcttgtatcggttctttcggcctgcacagtaaattggtaaattggaaccaaagtatcggtacaaagtttgttaatgagcttgtttatctggcttgcaacattatccccgtatatcctgtttgttatctggcagatgcgttggtaatcaactccattgaattctggagcggttccaatccgatggctaacgtgggtgatgtgaagaaagtaaaaggtgaaaacggaaactatctcgtaaaaacattggagaacggttactctatcacaaaagaaggtgaaaccactgctatggagctggtttacgacaaagaattgaacacttggaatgttgttgcagaaggtgttagcactgaattgctgcaaatgaacggtgatggtactgcacagatgtatctgccgaatggtgaagcaatgaatgtgacattggatgcgcaaggcgtagctgctgctcgtcaggcaacgatgatcaacacttattacgctgcacgctaattaagaaaagaatttgaatatgcgggcggatgagcaatcattcgcccgttgctttttatacccctcccgattttttagaatgggtaacctactgcaaagtggaaagcaaagtcacgtccgaagtcaggacgcagaatgggataacgatcctttcccttttcagggttaatagccttcataccaccatcaaagcgaagtacaaagaaatccagatccagacgtaatcccacaccgtaagctacggctatttgcttataaaactggtcgaacttgaatttaccccccggctgatcctgatattcgcgaatcgtccaaatatttcccgcatctacaaacaaagcacctctgaacttccagaataaacgtgtgcggtattctatactggcatccagcttgatgtcacccgactggttcatgaagttacctttttcatcggagaaagtaccgggaccaaggctacgtaccgaccatccgcgtacactgtttgctccacccgagaaataacgtttctcgaaaggaatcatccgtgcgtttccgtaaggaatggcaatacctcccccaatatgaaatgcaatggagttacggttatcgatgacgatatttttggcaaagtccaagtcaccttttatatattgtgcatacggaatattcaagatagtgtattcgtcctgatcattcttctttaaattgctcattttagaaagcacatataggagatttcccgcagactcaaagttgaaacgtatactataagaattaccaatcactgcattgttcatcaatgcttgtcctgcgctgttatagatatagctgtatccggtacggacaatcaaacggtctttatagttatactccagcagatagttcttctcatcgttcaggaaattatttttaaactcgggttctatccacggcatatataaatagttgatgtccagcaagtctatacgatgctgcgaacgctgtcgctgcaacccccatttataactccatgaaccggatgcaacgatgcgtgtaaactcgggacgcatctgataattatattgcagtccgaattctgtggttgcccttatcctccgcttgaagtcattggatatgaacggaaacatgaagcggggaaagtttatactggtttccacaccgagttccgtatagttgtcattcttataccctaaaccggaaacagcttcgtaagctccgcgaagcttaaccaagaaagtttcggaacctctgaatacattgcgattctgaaaagatacagatgccgcggcacccaaatcacccgcagagtttgttccctccagttcgaaagatacagactgatgtttgttcttcgtcagcataacataggcattcagctttgcgctatcacttacctgtgtttcgaagaaacgtacattggtatatttcaataccggcagacgtccgaagttggagtaagtgcgctgcacatcctgttcgttgtaaaaatctcccggagttatccgcagattatcagtcaaaactttaggacgcaggtataatttatctttataatatatgggaacccctttatagtgtatcgaatcattgatttccacactactgagagctgaagattgcaggacgtcatagtccgcaatgaaattcactttattaatcgtatactgtggatgatcctgcaattcagcaccggaatgctgtctgtatcgtgccagatgcaaggtcagatccacctgataagtgccacgtaccgtatccgccgtataagaaatataatctttattgaatttataataaccgttgcgaagcaggttacccgtgatccgttggcgttcactgtccagtatgttggcattgaagtacataccttcggataaataggtcgatgcagaatctttctgcatatactcccggattttttcatcctgaacatcatatttcaggctacggacaatatacggctctccggtgtttactttataagccagttttacctttttcttcttgattttgggaatgtactctacggtagcacccatgtaccccatattctgaacggctttcgtcatttcctcccgtgaacgttcggtttcttccttactatagataacaggggcatctcccagcctgcgtaaagcccggttcacccaacgggtagaatcacgtcccgaccagttgtaaacatacagctgggttttaatcagactaaaccatttggagttcggattttgccgcacatatatggacaaattagaaggcttcacatttttattatcagtatgtatgcgcacttcatccagcaagtatgaaccatccggcacatatttggtggtcgagcaggaagctaatgtaagtatggcagcagtaagtagtgcgtagtggaagcctttcttcataccagaattaataaattgcgcataattgactacaaatataaatctattttttcttttccgaaataaaaaaccggatgaagtgtgttccgttttttgattatatagaaataatcacgtacttttgccaaacgataacatttaagctatggcactgagcaaaaaccgcatcaaatatatccactcgttggagctgaagaagaatcgtaaaacagaaaaagtctttctggcagaggggcctaaactggtaggcgatttgttaggacattttccctgccgctttctggcagctacgcccgaatggttatcgcaacatcccaagcttccggtagaagacgtttcggaagtgtctgatgaagacctttcccgtgccagcttattgaaaactccccagcaagtacttgccgtattcgagcagccggaatatgaaacagatgcttccgtcatcagccactcgctttgcctggcgttggacgatgtgcaagatccgggaaatctaggtactatcattcgtctggcagactggtttggaatagagcatatcttctgttccccgaacaccgtggatgtatataatccaaagacggttcaagccaccatgggaggtattgcccgtgtgaagctacactatactcccctgcccgacctcattcaaagcctgaaggatataccagtttacggtacttttctcgatggagaaaatatgtacacacagaatttatcatccaacggattgattgtgatgggtaatgaaggcaacggaatcgggaaagaagtggagcaactcattaaccgcaaactttatattcccaattatcctgcagagagggaaacgtccgagtcactgaatgtggcaattgctaccgcagtagtttgtgccgagttccgtcgacaggcagcatcgttgtaaaatcgaaaggataaagtagataagcatttattccggaaggaaacgtttcttggcagaaaacttccggaagttcctgtaatacttcatttgctttctgaaatatacctgagtaccctttggaaatatcttcttcattattcaataaagcaatgactccaggaaaccattccactccttcaatctcctctgtcaagggaaaggcggacacgacttgtccttcttccacccctaccacatattgtttgagataaccatgtccgggcagaaaaataaagtgtgaagcaaatcgtttgatcatcaggggttatctttacggaattgaacatgctccggattgtccaacttcttcagtgtaggttccgaagacggacgaggacgggcagcatcacgtctgcgcggattatcatttatcttctcttccacaggtttcagttcctctttcttgagttcctgaggctctattttctctgtcttaacagaatctttctgaatggaatcattcttagcgaacgacagtgtatccgtagcatgataacgcatcagtgaaatgcggtcggtcagcaatgtacgggtagcctgtgctgctggataatagatatacccacgtatttcccggatttctcccaacgtatcggcgaagagggaaaccgtttccatacccgatttgtatactttctgaatatcactgattatgctgtccttatagacaatctgcatagccatgacgggagcatataaggaatctggcgcaccgttgtggaagcggaaacgaacgttccaccgcaaagtatcgcggtctttaaagttggtatctgagggtaatacgaaagtaatcttgttgtccatcggcatacctgtcagctgatagatacgttgccatgcccatacatcaatactgtcacccggaagactttccttcggtttattgtcacgtatggcaattaaatgattgacaacatcccgctccgctttcagccttgcatttactttctcgtaaatcttggtgagtacttccggattacgtgtgaaccaaaccattgaagagtcaaattcggcttgcgtaatgccatgctttttaaacaccgattcaatgtacaacacccttttatagccatcggtataaggaacttcttcccccatagcctttgctatatggtagtcataaagcacattttccatcttagcatccgatataaccaccttcggccttttcacctgacaggctgtcaaacaagatgctaacaggaatacgctaaaccattgaattcgacgcagacctttcatgatttctttattgcatgataagagtcattcaaatatttgctgtaaaataataacagggcaataataccacaactgatagcggcatcggcaaggttgaatatcgggctgaagaatatgaaatgatccccacctaccaacggcatccattgaggccagtttgtatcaatgatagggaaatagaacatatccaccacctttccgtagaacaaaggagcatatcctccgccttccggcaggaatgaagctatctgcgaatgtgtactctcattgaacaacacaccatagaacacactatcgatgatgttacccaacgctcctgtaagaatcagagatacacatacgatatagcctgtcttcaagccctgcttgattattctcgtcaaataccaccctatcgctcctactgcaacaatacggaacaaggtaaggaataacttaccgaatatttccataccgaacgccataccgttattctcggtaaagtaaatataaaaccatgtaggcggttctgcatctaccatgcccagtttctcataaagccattttatggcgttttcgctctgatgccaatacatgtgagtcttgacatagatcttgattatctggtcagcaattaataccgagaaaataacgagcagcgcaatgcgacctttcgtgaggtatttgttcatccttacttcttaccgttatttttggcctcaatgctcagtgtagcatggggcacagcacgtaaacgttcggcaggaatcaacttacctgtttcacggcaaataccatacgttttgttctcgatgcgtaccaatgcggcctgcaaaccctggataaacttcaactgacgttgagccaggcgtgtcgtttcttctttggacaaggtgttggcaccttcttccaaaactttgtacgtaggagacgtatcgtcggtatcattaccatcggctccggttaaactggctttcagcaattcgtaatcgcgttgtgccaattctaacttctcattaataatggcgcggaattcttccaattcagcatccgagtatcttgttttttctgccataactttacgtgttaaatcgttagtattattattcttttacaacgcttacgtacagggagaaatcgtcaaagttaagttccgtgccgttttccacctcatcggtcagcgtcagtgaggttcctaaaacctggttacaaatatagtctttatattcgtttaccgcatcatctgtttgctgattttttgataatgtaatctttattttgtccgttatctccaaaccgcttgacttgcggatattctgaatacggttaaccagctcacgggcaacgccttcccggcgaagttcttctgtaacggttacatccagggcaacagtcagctttccttcgttggcaacgagccatcccggaatgtcttcgctgaagatttctacgtcagtagcttccacaagcacatccgtaccatccagttgcaaagtataagaaccgttcttttccagttcggcgatagcttcctgtgacatttctgctacagcagcagctacggctttcatctgtttgccgaatttcggtcccatcttcttgaagtcacatttcactttcttcaccagcacaccggcggcaccgtctacgaacttgatatccttcacgttcacttcgctcatgataagtgcctttacagcttcgatgtgggcacgttgttcctcgtccagtaccggtatcatgatacattgcagcggctggcgtactttgatgttcaccttgcggcgcaaagccaataccatagaagttacgtcttgtgccatttgcatgcggacttccagttccttgtctatcatttcctccttatattcggggaatttagccaggtgtacggataccacgttgtcgcgtcccgttgcagtaaccaagtccatatagagtttgtcggcatagaacggagcgatgggcgacatcaatttggcaacagtttccagacaagtgtacagagtctggtatgcagataacttatcttgcgtaaattcaccaccccagaaacgtttacggttcagacgaacgtaccagttggagaggttgtcgtttacgaagtcggatatcagacgtccagcctttgtcggctcgtattcgctatagcaagtatccacttctttcaccagtgtattcagtacagagagtatccaacggtcgatttcagggcgttcagccatcggcacgtcagcttccttgtattcgaatccatctacattggcgtagagggagaagaaagaatacgtattatataatgtaccgaagaatttacgacgaacttcttcgatgccgtctacgtcgaatttcaggttatcccacggagaagaattggtgatcatgtaccaacgtaaggggtcggacccgtatttctcgatagttgagaaaggatctacaccattgcccagacgcttggacatcttgttaccattcttgtcaagtaccaatccgttagagataacagctttgtaagaaatggtatcgaataccattgaagcgattgcatggagcgtaaagaaccaaccgcgagtctgatccacaccttcggcgataaagtcggcagggtaaacctgatggctatccagcaattctttgttctcgaacggatagtggatttgtgcatacggcatggcaccggaatcgaaccatacgtctatcaggtccgcttcacgcttcatgggtttgccgtctttggatacgaggatgatatcatccacatacggacggtgcaagtctatcttatcataattttctccattgtattcaccgggtacgaaacctttatccttataaggattggacttcatgaatccggcagctacggatttctctatttcattataaagctcttcaaccgaaccgatgcagatttcctcgctgttgtcttccgtacgccagataggcagcggagtaccccagtaacgtgaacggctcaggttccagtcattcagattttccagccacttgccaaaacgtcccgtaccggtgctttccggtttccagttgatcgtcttgttcagctctatcatgcggtctttgcaagcggtagagcggatgaaccagctatccaacggataatacaataccggtttgtccgtacgccagcagtgcggataattgtgcacatgcttctctatcttgaacgcctggttgttggctttcatcatcatgcagagacttacgtcgagactttcgtcctgatctgtcagattcggatcgtaatcgttcttcacgaaacggcctgcatattccttatataaatctacgtttacacgctctttcacgaagttttcgtccaactcgtccaatttatagaacttaccggtcaggtccaccatcgggcggagttcacctttcttattgatgagttgcaacggcggaacaccggcggctttcgctacctgggcatcgtcggcaccaaatgtcggagcgatatgtacgatacctgtaccgtcctccgtagtcacatagtcacctgagattacgcggaatgcaccttcacccggattcacccaaggtatcagttgctcatattccatacctacaagttccggacctttatattctcctacaattttgaacggtatcagcttatctcccggtttgtaatcttccagggtgatgtcttccgctttcttattgaagtgcgtgtagagcaaagctttggcaagtacaacggtgattttctctccggtgtatccgttgtagctttgtacggctacataatctatcttcgggcctacgcaaagcgcggtattcgaaggcaatgtccacggagtcgtggtccatgctaagaagtacggagttccccactctgccatttccggcttcgggttcttcatcttgaactgtgccacacaagtcacatccttcacgtcgcggtagcaaccgggctggttcaattcgtgtgagctcagtcctgttccggcagcgggagaatacggctgtatggtgtatcctttataaagatacccttttgtatagagttgcttcaacagccaccacaaagtttcgatgtagcggttgtcgtaggtgatataaggatcggtcatgtctacccaataccccatcttgtgagtcagatcttcccattctttggtgaacttcatcacatctttgcggcaggcagcgttatagtcggctacggaaatcgttttaccgatatcttccttggtgatacccattgctttttccacacccagttccacaggaagtccgtgtgtgtcccagccggctttacgtttcaccaggaaacccttcatggttttgtaacggcagaaaatatctttgatggagcgagccattacgtggtgaatgcccggcataccgttggcagagggcggtccttcataaaaaacgaaagaaggacagccttcacgttctgtcatactcttggcgaaaacctggttctcgtcccatttcttcaacacttccgcgtttacctttgagaggtcgaactgcgaatattcggcaaacttcttacccatcttatttgcaatttaactatttacaatttaacgattaagggggcactttgagacgtgctaaagtgaccctccttattttaagggtgcaaagttacaaaaaagttagagaaaagatattattgaatagaaaaaaacatatctaaatggaatacggctcttcaaagaagtgttttagaagatgtgtattccatctttttctatttgttgctttaaaaaagcattcatgtttttatgagcgcgaatgacatcaacagaacatcctaaaagtttttccagatatgctttcattcttactattagaaaagggttaggtgtttctgtctctacgtaaatatcaatatcacttgtttctttttgctcattacgggcaaccgatccaaacaaatgtaaagaacgcacaccgaactgttgtttcaattcgctaccgcatgatttcaacaaactgatataatcgttctttgttttcatatctcattaaatctttagaacaaagatagacaaaaagagtattattcacaaatctttttgttatttttgcctgtcataattgattattcacccaaacaaaatatcaaaaataatagtatggacaaagatctaaaaaaggttgtggtacttctggcacaccccaacatggaaaactcacaagccaataaagccctgtttgatgccataaaggatatagaagatgtagctatatttaatctatacgagatgtcagagcaagatattctcaatatggatgcatggagccggattatatctcatgccaatgcggtgatataccagttcccgttttattggatgtcggcaccatctttactaaagaaatggcaggacgggatatttacctatttggcaaaaactccggcagtagccggtaagcctttgttggtggctaccactaccggttctgaatttgaggcgtaccgaagtggaggaagaaatcgtttcacggtggatgaacttttgcgtccttatcagggtggtgctgtgcatgcagggatggtatggcagactcctttcgtggtgtatggtatgggaacatccgatgcggaaaagaatattgccctggcagcagatctttataaaaaacgggtgatggcacttatcgggaaagataaatcggaagatagctggtaaagtgtaaagtatcagccaaaacacttgattttgcctttacgatgttgtatctttgtagaagctttaagctgagttttattataaacctaaacctttagtaaaatggcaaaagttagtctttctttttcagaagcctttaaacggtgcattaatttgacagatattttatgtaagataggctgtatgccggataattatgcgtggtttactcgttagcaaatcaaatagattatagttatttcagatgttcggcatctggaataataataggcaaaaaagaagataaggtggtatttcctcacaaggatttgccaccttttttgttgatttatattcaagttagggcttaaagctcattttggggctgttaataaacgttggatacattcttaaaaaacgttccggttattctttaaaaacgctgtttgcagttattactgagttgttttaggtgtcatgatttcagagtattaattcattcgcctaaaagaagtcatttaataatgaaatgtataagaggaagaaggaggactttttttatgagagcattggcagtattaaatatatgataatacattgtttgggctaaccttttgtttcccttgcagaaaaaatggaacagactatatatactcaaggattataaatagcagaaagcttcttatctttaatgaggataagaaacttttttgtatctgtcggaatgacagcgtagagtggagattgagaagttattggtaaagatttagcgaccatgtaactgcgctgaactgctacgctttgtatctcgtcggacaactctatgcaaatatagcgttttcttaaaaatggcacgacgattgagtttatgcaaaatgcggacagaactttccatccgcattatctaatcagcgtcaccgctcccgttctttttcatcgtcgcgttgcatccgtagtttcagacgctcgcgcatcttgtcaagaaaataggtgcgactctctctcttacgccgtttgatgtcatacacccttaatttgcatttacaattttctgtcatacagcaatgccgcattgagcaccaccaatactgatcctgcattatgcaccaatgctcccgtaatagggttcagtaatcccaatacggaaagggttatcgctacgaaattgatggccatcgaaagtgagatattgactttgatggaacgaatgacagcattcgacaaccgtttcaagtaagggattttggcaatatcgtcgcccatcaatgctatgtcggcggattcaatagcaatgtcgctgcccatgccccccatagctacacccacatctgctgttttcaaagccggagcgtcgtttacgccgtcgcctatcatacatacgttgtgcccttcctgttgtagttccgtaatagccgaaaccttttcagagggcaaaagttctgcacgtatgttcttaatccctatacgcttggccagataatcggcagacaatctgttgtcgcccgtcaaaacaacgacatccacccccatacattccaattcggagaccataccacgggcttcggaacgtattatatcggatagggcgataaggccgatgcatctttgatcgagtgccgtcaggacagaggctttaccatcattgcgcagggtgtcgagtgcaagccgcatactattatcgagaacaattccatgttcttccagaaaatcgcttttcccgcacaacacccgttgcccgtctatttcggcttcgattcctttgccgggaatcattctgaagcaattcgcagttgccggttcgcctttccggtcgagccaatattttacgatggcttttccgagcggatgttcggaacgcaattcagcggatgccgtgagtcgtaatatctccgtctcattcttgtcgggaacaaaactgatcacatcgctgaccgtaagattaccttcagtcagtgttcccgttttgtcgaacgtaatgcaatttacttttcccatacgttccaaagcctcacctgacttgatcagcacgccgaatttcgtagcctgaccgatgcctgctataatcgacacgggggtagccaacgccaacgcacacgggcagaatacgaccagaaccgttacggcacgaaccaaatctccggtaatgaaataagcggcaacggctatcagcaaggcgacgggaacgagccatgcagcccatttgtccacaatccgctgcatcggggctttcttgttttcggcctctttgaccagctcgatcattttctgtaaagaggaatcttctcccactctggttgcccgaatatcgaccgaaccgtagcaattcattgtaccgcagaacacgttatcgcccgctttcttatcgacaggcagcgattccccggtcataatggactgatctacggaggtcgttccgctgataatctttccatctacggctatacgctctccgggcagaacacgcagcaggtcgcccaccttgatttccgccgccgctaccatctcttccacctctttaccatcgcgcaggatgattcgtcggccttgttccggtgccagacttatcaatttgccaatccctcgcttggctctgtttaccgtatattcctccagcaacgcgccgacagccatgatgaatgccacctcgccggctgcaaacagctcaccgatataaatgcaagccaccattgcaatacagataagcaacgccgatgatacccaccgttgaaaaatcaaccgggtaacggcaagataaagcaacggaatgccgcagataacaatcgtaatccaagccggatcgagtatgacttcgatatcggccagcatcaataccagactgactgcaagtgcaataccgcctgcaacagtcatctttactccttctaaaaaagctattatatgtttcatttttataattcattgaggatataggcggatatgatcctccgcctataatcatttatcgtttacgttttttcttcggggggggattttgcggtgcaaacaatgcttctcccgtagtccatgaaagagaaggaaagattgtcagacagcaaaacaagtggtaatatcgtatcgggcaatgcggatcatcgcatttcagtacaaaattccacacaatcacgcctgtaataataccaatcgcaagacttatagcccgtcttacggccggcttcctgactgtcggtgtcataacatagctgccagaagttcagccaatgccaattccaaatcccgctctgcctgcaatcttttgttgtaggcaacgaaataatattccatctcaagtagataattcagcaaggatatttccccgttacgatatgccttgaataacaaatcaccattgtcgttctgctcgaacacggaattgtattgtctgacattgttctgcaacccggacacctgcacgtatagattcttcaagcggttgtaatattgcattcttgcgtcttccacaatccgctcggacgcctttacagtcgccttggcctgttttaccttattcttgttttcccacaagggaatggacattccgatcgttgcaccctgaaatttttgtcctgcgacgaactctcccatatagcctacggagaatttgggcaacgacgaggcacgggatagttttacttgacgattgtctatctccacttgcgatttgagatacgacaatgcagggttttcagcctcggcttgtgcataccaattctcaaaatccgcaggcaatacggcggtttcgtaaactgcccggtcgaaaactatcggatttcccccgttgagccgcgacagttctgacaacagccttttgcattcaaggtttatccgcttcacttcgttgtccatgttggtgtagttcaaaacggccttgttatattcgagctgattggcatcgcctgtctgcttcatccgttcgtaagcctccgcaatctgtttcgcgttatctaactgacgttcgtacagtttgccgagtgcgttgtaatagaccagttcgatacagaacgtcttagccgacagcaacagctccatccgttgggatttatactggtattccgcactgttgttctgcaaatcggacaaacggctgcgctgcgcgtataccgttgggaagtcgaacgtttgccgaatatttatgtccttacgattacctatcgcggagggacttccccacaagtatccgaattccacttcgggattggcgggattgatacccgtcttgttacccagcttttgagcttccatctgttctttcagagcttccaatgtcgtactgttctgctctatctgctccagaacggaggtatatacatcctgaccggatacagacaatacggagaataatacgatgatgctcaatattatttttttcatacccttatttactgtttaattttctttttgcaaaccattcatacacgaccggcatcacgtagatattgagcaaggtcgaggtcagaagaccgcccaataccacgatggccatagggctttgaatctcatttccggccttgtcgccgttgaataccaatggaatcaaagccagagcggaagtcagtgccgtcataagaatcgggttgagacggtcgatcgagccatgcagcaccgtttcatgcagcggagtccctgcttcctgcaaatgccggtattttgaaataagcagaataccgtttcgcgtggcgataccgaacagcgtgatgaatccgataatggatggaatactgattactcccgaagcaaagaatacggccataacaccgccgataagcgcaaagggcaggttcagcaatacgatgaccgccaacgaaacattcctgaattccccgtacaacagcaagaagatgatggtcaatgccagaacggtcgtaaggaaaagcgtgcgggatgcgctttgcgcactctcgaactgtcctccgtattccacacggtagccttcgggaagagagatgttctcatcgatcgccttttgtatgtcgcggacaacgctgcccacatcacgccccgaaacattggctgacactacgagcttacgctgcacattctcacgggtaatcgtattggggcctccgacagacacgatttcggagacttcctccaaaggtattttcctgccatctcccgtatcgataagagccttgcgtactccatccatactttccgtatagtttttgtcgagacgcagtacgatgtcgaacttccgttgtccctcgtacatatccgcaatcttttctccagcgaaagccatttcgatgaactcattgaaatcctccaatgtaatcccgtattttgccaacgctgcacgattggcctgcacctgaagctggggcgtttcgacctgctgctccacactgatatcgaccagaccatcaataccttcgatagaacttttgatctggttccccaacatgaacatacggctcaattccgtaccgaacagtttgattgcaatattggctcgtgttcccgacaacatgtggtcgatgcggtggccgagcggttgtccgatcgtagctgctactccgggaatgcctgccagccgttcccgcatatcgttaaaaacctcttcccggctacggtctttcagagcaaactgaacatccagttcggcactgttggtcgattgtgaatgttcgttcaattctcctctaccggtacgacgagcagtacccgttacttccggaactttcatcagttccttctccatcatgtcccctaaccgatcgtttacttcgagcgatacgccgggtttggcgacggcggaaaccactgccgatccctcattgaattcgggcaggaaacttcgtcccatcgtggcgaacagagctatggctacgataaagaatgcgaggactgttcctactacctttttcttgttgtcaagaacccatgccagcgatttgaaatatccagcggagagtttccgtgtcagccagctgtctttttcattcttatttaaatacttgtcgtcggacagcatcatcttgcagagtaacggggttacggtcatcgccacgatcagcgacatgaacagcgagataatatatgcggttcccagcggtttcagcatgcgaccttccatccccgtcaggaagaacaacggaacgaatgccaccataatgataaacgtggcgttcagaatcgaggcccgtatctctttcgaggcttcaaacacaactgtaaagacaggctgtcgttcttctttgggtttgttatggttctgacgcaatcgtttatatacgttttccacatcgataatcgcatcgtccaccaacgagccgatggcgatacacatacctcccaaggtcatggtattgatgtccattcccagcagatagagtacgacacatgtacccaacaatgaaagaggaatggcaacgacagaaataagcgtggtgcggaaactcgccaaaaagattacaagaacaaccaccgcgaacagtgccccttcgagcaacgattgtcccacattattcacggaggcttcgataaagtctgcctgacggaaaatgcgcgtgtccatccggacatccgcgggaagcgattttcggatctcccgcaagttcgtctcgattttctccgttacgttcagggtattgatattgggttgtttcgaaacggcaaggataacggcgggttttgcatcctgcgaggcgtttcccatctttacggcatgaccgattaccacatcggcgacatcggaaaggacaacgggttgcccgttagccctctttacgaacgtactgccgagttcctccaaatcggtcgtccgggccatgccccgcaaagcgtattcattgtcatagtctcggatcactccgcccacggaattgttgctgaatgttttcccaacctcttccagttcggcaagcgtaacaccgtaagcatccattttttgtggatcggcgagaatctggtattgtttcagttctcctccgatattcgtcacctgcgacactccgcccgtggcgagtatggcgggcttgattacccaatcggcaagtgtgcgaagttccatcatcgaggtcgtgtcagcctgcaatccgatcagcaggatttcgcccatgatgctggattgaggcgcgagtacgggagtgattcccgtaggaagggcatttccgagagcgaccatcttttcagaaacaatctgccgcgcctgaaaaatatccataccccagttgaactccgcccagacgaaagagaaaccctgcatggaagccgaacgcacccgacgtacattcgtcgctccatttaccgcggtctcgatcggaaaagtaaccagacgttccacctcttcagctgccatgccgtgcgcgtcggtcatgacaacgaccgtcggagctgtcaggtcggggaacacatctatatccatcttctgtgaggagtaaaatccgcctactataagcaacacggctcccaacagaacaaccagccggttcttcaacgagaaccggattattccatttatgaattccataaagctgtcctcccttctttaatgagcgtgtcccgattcagcgtcgagcgaacccgttgcttgtgcgagttttaccaaaacagcccctttagcgaccactcgttcctgtccgttcaggccggaaaggatttccgtccgcaccccgtccgtttggccgattttcacttcccgtttctcgaaatactccggagtcagctggacatagacgaaatagttgcccatctcctccacaagcgacacgttcggtacggtaatgaccgactgctcgccgcgagtcctgatatacatttcgacgaatgaacccggcagcatttcggcggtgttgtctacctgaaacacgaccggaagaagtgggctattcgtttccaccgatttcccgtatgaaaccagacgaccgttcaagtcatccagcgtataaaccttatcgtcattcaacatgcggaaacgggccgtcgaaatattactcaacaacgggtaatacttaggctggatttcagctttgataaaaagattgcgattttgagagatggcgacgatcggttgtccggcctcgacatattcgccgttacgaacgagcagttgttttacgaaacctccgatcggagccgtcaccgattggcggcctgcggaaaagttcttgcgcaggttgttgtaaaccgcatcggccgcttcatagtttgctttagcttgaagcagttcgctctcggatacgattctgtcttttgcgagttcctgcttgcgttcgtattccttcttggtcaagttgtagttgctttccgcttcacgataacggacggtaaggttattgtccgccatgtctccactctcgatatagaacagagcttgtccggtattcacagattttccgtctaccagaccggcctccggaatggcaacgattccgcttgtttttgccgttatgacacgttcgtcgccttgcgacggctgaatttgcgccatcgtgcgaatgacttgcccgaacggttcatcgaggcatgggacggtggagaaattcactttccagctcatctccttgatgaaagcgattccgttgctgcttgttgcaacagcctttgccgcctcgtgttgcgcgtcatgtttatccttatataccgtgatttccggtacgacaattcgggagcttcccgcagacgtttgaatatcgaactgtatggttcctggtcccgctactttcggagtaagcataaatttgtaaactcccggacgagacggactttccaatacctgactgattctctccgttccgactaccaaacttgccgttaccttgccggcttcgagcggtttgaaatttttaaggaacgtaaaatgggcaagaatgtcgcttgcctctccagcgacaaaaggcgtagcttccgcgtatacctcgaagtcgttgctatatgccgtcagctggagattttcttcatgcacgtgctctccttcggttgctgcgtgttcgtgctgatggttgccgcaacctgttacggttactgccacaagcagcaccgcgaataaaatgtatgatttcatttagttattttttaatttgttgcaaataaatggacatacgaacctgggacaagcgaaaatcgcctgccatacgttgcgtaaaaaaataattaaaaaattaacagataggaggtgcgcgaagaccgatggcgcgagcaacataatcgagatgactgcccgcaatataaggtttgggaacaaatggcaaactcccgaggagttcggaagcaactgtaccgacgactatatcggctgaaaataaatcgaactgatagtcgaaatcaaaagaacctgaatcaaagctattatctttctgtaaccggaaaacagcagcgacaaccgtttcattgatagcgcattcttccgaattcgaaccgtgatgatgtgtctcgctgtcgtgtgaatgattcagtgctttttgtgcgtcatcgtcaagaacattgacgattgctgcaaaaaccttattgtgatgatgatggggtacaacagcatgggccaatatcgcaatattggcaagcaatataaaaaatatggatattgctcttttcatttgttgttccaacataattctttcaatttgcaaatataaccaatttaaattcaaccggaagaaaatttgtaggaaatttcagccatcgccatttaatcgttatttttcgcttaatcgcccgacttcggaggggcgattgtttcccgtcagggcaagacttttgagagtaacttactcccatatcggggaagaggcttgcatctccgtagtttttgatacgttctgcgtttttcaatacctccatatccagctattgctcgattattgtattcgtttttataaccgtcagtttaccgaacggcatgaattaaacaaggatgtattagcagcgtttcgagaagtctgccaaagaatatctacggaagaaattactggaagcggcgaaagaactatttctgaatccacaaaagagcatcacgccagttggtatttccctcggcttccaatatccacaatatttcgtccgcttctttaaacgcatgacgggtatgacgccaagcgagttccggggaaactgaaatcgttacaaatcttttgtttgcagtcttcttgcactcatccgctattggagcacatcaaacacttttattagagtatcctcaagttctttggcgaaaaataataggtttacgtaatattcactacctttgtagccaaagcaaaaacattgcatgtgaaaaggttactttccaacatcgtaaagtatgtactgatagtagtatttgtttattactacgtaggaaacacagcctttgtccatacacatgtagtcgataattttctcgtaactcactcccacccttacctgccgggcacacatcattcgcacacagaagcacagtgggaaaccgtctcctggttcaatttattatgcctggacagttcgcatgagttgccgatagttccctttattttatttttcctaagtttcatctttttgttgcatggaacaaaccggattgttcgcccggcccggtctttccatttacgttctccaccctgtcatgtatgctgaacagattttattatttaagtttcgtatgtagcctgaaagacagagcatatgcgaaaccttaatctgttattcccaaaatacatgaagaaaaacgagttcttatcataacgacaaagaaatgaaatacatatatttattgtgcctgaccggcatgatgtgctatgcctgtaccggtcagcaaaaagaacaggaaaacctggaattttctgtttcaggagatactattatggtatcttcggaatcccccatcgccaagaaactgaaaataagcgaagttcagaaagaattgcatgaaacaacattcacagtttcgggtatcgtgaaagccatccccaatcattatgcagaaatagcctctccgtttgcaggacgggtgacgcgctcctttatccgtctgggacaaaaagtggataaaggcagtcctctgtttgaaatcagttcgcccgacttttttgaaaccggaaaagtctactaccaggcaaagcaagaaatggaactggcttccaagaatctgcgccgcgaacaggacttgtatgcacacaaagtaagtgcgcaaaaagaagtggaagaagccgaagtgaactatgaattgaaaaagaaagattatgaaaatgcgttggctgccctgaaagtattccagatagaaccggaccagttagtactgggtcagcctatgattgtacgttcacccatttccggtgaaatagtgaagaataacattgtaatcgggcaatttatgaaagacgatgccgacccggtagccgtggtagccgatctgaatgaagtatgggtagctgccaatgtgaaagaaaaggatatgtccctgctctcttcactgaaaaaggtggaaatatccctggtatcgcaatcaaatcagaccttcagcggtacaatctaccatatcaacgaaatgctggatgaagatacgcgttcggtagaagtattagtggcatgcgataataaagagcgactgatgaagcctgccatgtatgccacagtgaaactgactgacgagcctgctgaaagtattctgatcccgacttccgccattttgcaggaagaagaacaggcgtatgtactggtctcttcgggcaacaataaattcttgaaacggaaagtggaaacttcagctacggatggtgataagagtgtcatcacctccggcctgcaatccggagaaaagtatgtttcggacggtgctttctatctgctgaacgccaactaaacaccggggttacagagtatgaagaagttgatttttctggcgatacatcgtcgaggactgatgttcgtattgtttgccttcattgccgtggtgggttactattcatggacaagactggcaatagatgcttatccggatattgcggataccaccgtacagattgtgacacaagtgccgggactggctgccgaagagatagaacagcaaatcacaattcccattgaacgggccgtaaacggtctgccgggactgaacgtgatgcgaagcaaaaacaccttcggactgagcaccgtggtactggtgtttgatgacggaattgatgattactgggcacgccagcgtgtgcaggagcgcttggtagatgtagaattaccttatggtgccgtaccggggctgaatcccctgacctcgcctaccggagagatattccgctacgtcattgaaagcgataatttggacctgcgtgagatcaccgatttgcataaatgggtgattattccccggttgaaacaagtgacaggcgtagccgatgtaagcaactacggtggcatcactacccagtatcagatcgaactgaatccacgtaagatggaagagtacgacatttccctttctgacgtgaccgaaaaagttgaaatgaacaatgtgaacgccggaggaagtatgttgagccggggtgatctgagttacgtgattcgcggtatcggtctggtgaaggatttgaaggacttaggacgcatcgttatcaaaacggataatggagtacctgtgtatctggatgatatcggaaagttgaaatatggtagcctggagcgcaagggtgtactgggcttttatgatggcaaacgtaatttttctgacggcgtagaaggcattgtgcaaatgttgcgcggccagaatccctcacaagtgctcgaaggagtacatgccgctattgacgaactgaacaacgaagtactgccaaaaggtacacacattcatccttttatggatcgcacaaacctggtggatatgaccttacacacggtttcgcatacactgtttatgggtatgatcctggtgatattggtactgattctctttttaggaagctggcggggtgcattgctcgttgccgtcactattcccctatcgctactgatagcttttatcctgatgcacgtgacggatatacctgccaacctgctttcattgggagccattgacttcggtatcctggtagacggctctatcgtgatgatggaaacgattctgaagaagcgtgaacggcatcccgatgaagtattggaagaagattccatcttacggcgtacaacggaagtcgcccgccctatcttcttctctatccttattattataaccgcttatttgcccctgtttgccttcgaacatatcgagaagaaactgtttacaccgatggcatatacagtgggatatgcattgataggcgctctgtgtgtagcattgtttctaattccgggactggcatatatggcttaccgtaagcctcggaaagtatatcataaccgttggttggaaaaattgcagatgctgtatcacgcacaagtggttcgtgtaattgactgcccgaaagccgtattgggagtattggcaggaatcctggttttagcaggtgttttgagctacacggtgggaaaagatttccttcctcccttagacgaaggggctatctggattcaggtacaattgcctccggggatttccatcgagcgttccaaagagatgggagctgaattaaggaataaattggggcagtttccggaagtgtcgtacgtaatgacacaggtgggacgtgacgatgaaggtgcagaagccttttccctttcgcacatcgagtgcggtgtaggattgaaaccttatgatagctggactacaggacgcaataaagccaagctgattgaagcgatgaatgatacgctcatgaccatgccgggatattcggtaggtttctcccagccgattattgacatggtgatggaccagatagcaggtgcgcacagtgatcttgcgctgaagatatatggggaagatattatagaaacgcgtcatattgccgataaagttgtcaatgtcatcaagcagattccgggcgcgacggatgttgccgtagatcaggaacctccccttccccaacttcagattatagcagaccgtgaccgtattgcccaatatggattgaatgtctcggacgtggccgatctgatagaacttgccattggcggcaaggctatttcgcaaatctttgtgggtagtaagtcgtatgacgtcatctgccgtttcagcgaagagacgcgcaatacgccggaacgcatcggaaacctgatgctgacttcgggcacaggtgccaagataccattgagtcaggttgcggaaatcaaactgaccacaggggcaagcaccatttcacgcgagatgaataagcggcatcttacaatccgtgtcaatctgcgtggtatcgacctgacttctttcttgcagaaagcgaacaggatgattgatgaccaggtgaaatacaatcacgaagattttcatctgaaatgggcgggacagtttgaaaaccagcatcgtgcatacaatcgtttgggtgtggtagttccgttggcattgggcattatgttactgttattgtttgccgccctcggcaaattccggcaagcggctttattgatgtgtatcattccgttggcactcttcggaggtatgcttgcactgaatgtacggggaatgacgctgaatgtatcttctgccgtaggcttcattgctctgattggtgtagccattcagaatggagtgattatgatttcgcatatcaataatttgcgcgaacgggggcgcgacttgcgcgatgctgtggttaccggtgtgcgccatcgtttccgtcccattctgatgacggctaccgttgctgtgctgggtttgcttccggcatccctgagtacgggaattggttccgatgtacagcgtccgctggcaacggttattgtatacggattgctgtttgctactgtggtgacactgtatatcctccccactttatattatatgatggaaaaaaaggaagataaaaaggatgaaaatgaaaagatataatattgtgttgtttacccttatcgtctgtgcctgttcagtgcaggcacagactgtagaaccgattacttataagcagtatatgcataaagtaagtgccgacaatctggaatatgcagcggagaagatgaatgtcagcgccgcacatgcagatgtgatagctgccaaggtatttgatgatccgtcgctctcttttacttattccaacaatgaagatcatactttgcaaatggggcaaagctatgaactggaactttcgcagaacgtaactttaggaagacgtacggccggcatcaagttggcacgcagccagaatgaactggcggaaattgtgttggatgattatttccggaatttacaggcggacgccaccattgcttatctggaagtaatgaagcaaaaacaactcagtgacatcaagagaagtgcatggagcaatatgtacgacctggcgaaatccgatagtattcgtctggcatccggcaagatcatggaggtggaagcgatacaaagcaggctggaagcggatatcatgtataatgaggtgctgcaagctgagacggacttaaagcaggcatatatgcaactgtccctctttgttggaaccacagttacagatacgctgtttcatccggtggaagaactgaaaaagccggaacaggtatttgtgctgaacggattgattgagggagctatagaacatcgctccgatttactggcagctttgaagaatacggaggttgcacgtcgtgaactgattctggctaagcgtgaaaagcgtcctgatgtggagttttcattaggatggagtcataacaagcgtgtacgcaatgaagaagcacctgctccggcattcaatggagtcagtgcggggattgcgattcctttaaacttctcttctctgaacagaggtgcggtcaatgctgcccgtttccgtgcccgccaggcagaattgcaatatgagcaaatgtgcttgcaggtacaacgagaagttatgggagcttatcagcaattccaatcgcaggcacttcaagtgaaacattacgaaggcggaattctgaaacaggcgcaggatgtacttgaagggaaaatatacagttataaccggggtgaagtttccctgttggaaatactgaatgcacaacggacgtatgatgaagttcaggcgcaatatatagaaacgctgtttaattataatgcggcactcgttgagctggaacgcagctgcggaatttgggatataaagggataaattgttgataatacaaatggcactatagagtctatttcttctcctcgaactcttcatagagagctatcggaccgtagtgccataattttgtttcttctttttctaaggccttataagtgtttgacctgtagaaaatacgaatggcatccagcaaagttactcccttttcttctgcgtaaattttagcaaaaaggctcacctttccgggtaatagaagatggagatttttatcagttatttctctattcataaaattatctcctttacttcaatgtatttcaaatatttcaatgatttatctgtatggaatagcatttgatctaccagtttataggttttcaactctttaataagtccttctttatctaaaagttcgctttcatatagagcaaaggctgcataaaccctgtcattagctactggtccgtaaaccaaatcatgattatgttcaaaatttcttaatgtacgatttgacataacaaaatctacccattcttctgtaggttcatcaaaccacaaaatattcatttcggacatgctggcattatccatttcatagacattgatataacctacatttgcttgagctgtcatgcgtctcctcacccactgctctgcttgttcgtatgaggtcgtagtatagaaaccggtaccataatcaagcgttcttgtaggcttaatgattcgaggttcttgcactatttccaaacttccatggtatagtttcatcctatttcctcctttttttgctgaataaagtcatcaatttcctctaacaaccattgacgactttgtgtatgcaaaatctcaaagttgtcagacaagtactctgtcaccccgtatttgtcaaataggtccataacttcattgccattagctgaaatatgaactttatactgttcaatacagaatgaaataaagtaagctatatccaattctttttttaccattcctacttcttttagtgctcgaaaatacgatttttatcagaaagatacaacctctttctgtttttttcatttttagttcacataagtcacttctcccatatttcaggtcgcgtactctgctgttatctcaggatatcgtatttcttgtatgaattcttaaaatcctcaaatccgcaactaagcccttcaacgtccttcttgcgtgtacaagtcctctcattactgaattggcagataaattgaggcagaaacacccaaatcagcctacaatatccccttaccccacaatgcgacttgaggcaatacgcagtatcatacccataagttgtaggcgttatccaaaatctgtctgaaatacatccgcgtaagcattgttacaggtatagatattcagcacataccgccttgatgtcctggtccactttgctggtacagagacatacctgaagacaaacgcttttatgcggcttgttgcattgagtccgaacctctttacgtcaagtctgtggataatggccttgtagaagttacgaacaagtgctgtaagaagaaggaacacggtgttctctgccatgaaggatttgggcaatctgtcccacccaaaaccattgttcatatcatcgaagattcgttcctttcctccacgaaggttatagaactcgacaatctctcttacggaagattcatagtcgttagtcaggatacaacggtatgtgtattctccttcccaaagatcctgcacaccatccatccgtttctgtctttgaatcacgagtcggtatgctttacccttccacttatcaacaaggattgagttcaattcgaactcaatgccattgatttcctcagttttccaacctctgagagcaaagatgtcattatagagcgaactgcagcggttagcacggatatagaaggatttgcagtgttcctctacttcttctacgatttcctcggaacacgatccacaatcagctctgaaacgattgatagtaaggccgttctgttcaaatctctcaaagaatctcttcagcgtgtccttctgatgaaaacggacatttgtgttgccatcgctattctctatgccgacaatcaagtcgccaataatcgccacgccagggcgatagccaaggaacttcttgtatgtaggcttggcatcatacttctctgtctctatgaactgatggtcgaaatcaacatcatacatctcaccctccttcagttggtcagatgcaaacatacaattgagcagtaaagtattgagagtgtcagccgtgttgaaatcgtagttctttcccatatctgatgtgtatgagatgttttcttgcgtcagctcctttatcgctctgaggatagtgtcagaactacaagtacgaagtgtcggatgaagtgagagatggttcatcaaatgagtagtgacatcctcaatacatgagccaccacagaagtagatactcatgagagaacggatgatttcgctgtactgataaccgaacgatctacaccttagaccgagggtcgagtcgattacagatgacaatgtggagtcaaattgctccatgattgaaaatattcctccaaaaggagtgagtttctcagatttaatttgtatttttgccatgcctgatgaggttttgtttgattattatagcaacactaaattaagtgaatcctctgacatggcaaaatcctgggcaactttttgttgctcaggtacttaaaaagtttaagttataatagtgttgcggaattaaggaaaatgagagtatgtgattgtcacaatatcctctttttttcgtatcattgcaaacataattctctaaagaacatactattatgaaaactagatttttattatttgccgtatttctattggtgtgcagcactgcattcagtcaggacagtgataatgcgaagtatattgaggttaccggaacttcggaaataacccttgtgcccgatgagattcattatcttattgagattaaagaatattgggaagaggaatttgacggaaagtccaaaccggagaattatcggactaaagtgccattggtaggaatagagcgaaatttgagaactgccttacgaaagatcgggattccggaagacgccatccgtacacaagaagtaggcgactattggcgtgaacgcggacttgaatttctggtatccaaacggtttgatatcacattgaccgatttttgtcagatagatgagattctaaaggttatcgacacgaaaggtatcaactacatgcgtatcggagaactgaaaaacaaggatatgcaggtctatcggcaacaaggcaaaatagaggcactgaaagccgcacaaaagaaagctgaatatttggtggaagcattaggcaaacgcctgggagatgtcattcgcattgtcgaaccgcaggaaagtgtaggttattcccggtattttgcagcccagagcaatgtaagttcatcacaggcagaagcttacgatgctttccgtacgataaaactgaattattcgatgttggtaaggttcgagataaagtagaaataaaaagatttatttcttttgttactgtgtcattaaagtgtaactttgtacaaaacgttacgttatgggaaaagtaaaagaaccagctgcaacttactatagccgtccgatgctgaatgccttgcgcaatcacataaaagacagaatagaacaaatggacgatgccgtgctattatctaaaattagcagcatgcttgataaagatgaggaaagctttgaagagcgttatcaacgtgccaaagaatttgcatatacacatcttgacagggaatttgcagaagaacttgaaaaagagaattttctgataggcaaacctataccttgccaatatgctgatgaggaatttgaaaaagaatcaaaactgtcagaagccagcggtattgctactgatgaagaagtaaaagccgctttcaatttatggttgaacttaaagtaatctggacaaagcgggcacttgccgtatttcaaaaaactgcatattggtatgctgcaaatctgggaatacaattcgctgccacctttgcaaaaaatgtagatgaagcggtacacaagattttattaatgcccactgttggccagcttgaaaaacgtggaaaagacaaggagtataggtctatcctatctcaccctctatgtagagtttattattggtacaataatacggaaatacatattatcaggctacgttttaataaaatgaataaataatccgattgttctatttcttcatccttacctcatacaagtcgtttctcctgtctttcagattgcgcacactgccgtaagtatgcaattcattcaataaatccaggtccacatcggataccagtatcatttctgtattcggtgtggcttctgcacgcttgccatctgtcggaaatgcaaagtcgcagggagtaaatacacctgattgtgcatactgaatatccatattgtgcacgcgcggaagattacctacactaccggcaatgacaacgaaacattcattttcgatggcacgggcatgggcgcatacctttacacgtgagtaagcattttgcgtatccgtcaggaaaggaacgaataaaatctgcatgccctggtctgccataatacgggataattccggaaattccacatcatagcaaatcagcacgccgatcttagcacagtccgtatcgaatgtctgtaaagcctttccgccacttaatccccagctttttatttcatcgggtgtgacgtgcaacttctcatacatctcaaaactaccatcgcgacgacaaaggaaaccgacattatacaaaagtccatcttctttaataagcggcatgctacccgtaatgatattgatattgtaactgatagccaacttaacaaatcgttctctaatctcctcagtataagccgccagtccgcgaatggcctgtgactccccttcattattgaattttgccatcagcggggcattgaagtattcggggaaaagaatgaagtcactcttataatcggatacggcatccacaaagaattctacctgttcaaacaggtcatccagcgtttgataactacgcatttgccactgcaccaatcctacgcgcacggtggttttcggtgcaatatattcttccgtaggttcctgatagtaaatgttatcccattgcaacagacaagcataatgcttggactcttcatcattaggcaggtaattgcgcatcaccttgcgtacatggaaatcattggaaagttgaaaggtcaatacggggtcgaaaatttctttctgctttaccttatctatatactctttcgggcgaagttgatctgcgtatttataatagttgggaatacgcccaccgaacataatagctttcaggttcagagtttcgcaaagctccttgcggtattcgtacatacggcgtgccaggcgaagcccacggtattggggatgaataaagacttcaataccatataatatattgcctttaggattatgggtattgaaggtttctttacccgtcacctgtgcataagtatgatcgttcttcacatcatcgtaattcacaatgatggaaagtgcgcagccgacaatcttttcgtctaccacggttacaatctgtccttcggggaaaattcggatgagtttttcaatttgtttgtgtgtccaaaacacatcgctgccatccgtatatacacgggtgaatgattgcgccagttgctcgtagtcttctatttgtaaattacgcaactgtactttgttgattttcaatgagtccataatgtttcttttttataccaaaagttaaatccactgcaaaggtacggtttaaacttatacattgtctcccggaatgcatatttttgtaagagactgattttgcaataaaaaagaaatgaggatttaacactttagggataagagtattttgctttttttatacttttgcatcgttttctacaactttcagtttatttcttatttaatttttaaaaatcatggctaaaaagatgttattcctgtttgtgcttttgctttcccttacaggaatgctcaaggcacaggtaactactgccggaatgagtggtaaagtgatggctgacgaagaatctgtcatcggcgctacggttgtagccgtacacgaaccttccggaaccagttacggtactgttaccaatgtagacggacgtttcagtctgcaaggtatgcgctccggtggtccttacaaggtgacggtatcttacatcggttatcagacggcaatctatacaggcatccagctgcaactgggtgaaacttattcattgaatgtaaccctgcacgaagcttcggaattattgggagaaatcactattacggccagtaagtcaaagttcagtgctgaaaagacgggagctactaccaatatttcttctgaacaactcaccacattgcccagcattaaccgcagtatcagcgactttacccgcatctctccatatgcgtcaggaaacagttttggaggccgtgacggacgctccaatacgttcacggtagacggtgcgaacctgaataacaacttcggcctgtcgtctggtttgccaggcggtggaaatccgatttcactggatgccattgatgaagtacaggttgtgattgccccatacgacgtgcgtcaggcaaactttatcggtgcaggcatcaatgctattacgaaatcgggtacaaacgcttatagaggtagcgcttatatgtacttcaacaatgaagtgatgcgcggtaacaaaattggcgatactgatttcggtgcgcgtgccgaagagtccaagactgtttacggtgctacatttggcggtcctatcattaaagacaagctgttcttctttgcaaatgtagaatatgaaaagagtccgcagcaagtaattacatggcgtgcggcaaaagaaggagaagacccgaataactctacgatttcacgaactacggaagctgatctggcggaattttcacagattctgaaagacaaatacggatacaataccggttcgttcacagatttccctgccgatgtcaccaacctgaaattgctgggacgtattgactggaatatcaatcagggaaataagttgagtgtacgctataactttaccaataacaaaacctgggaagcacccaatggaagttcgggaaataccgggtatcgtttggcatacaaccgtgtttcagcatattccatgtcctatgcaaactcttgctattctttgcagaacattgtaaactcggctactgccgaattgaatagtcgtttctcttccaatatttccaatcaactgttgtttacatacagtgacatgaaggatgaacgcggtacaaactccagccccttccctttcattgatattatggccggatattacgaaaacggtaatcagatattagaaccttacatgactgccggttacgagttgttcacctataacaacctggtgaaaaatacggttatgactattgtggataacttcacctattatctgggagctcataaactgacggcaggtatcagctacgaacgtcagaaagccggaaattcatacatgcgcaacggaaccggatattatcgctattccagcttcgaggatttcaagaatggagctgcacctgagtcgtttgccttggcttatggatacaatggtaataccaagccttctgcggatgtgaaattcggccagttgggcatttatctgcaagacgaatggaacatacgcgataattttaaactgactgccggtatacgtatggataatctcagcttcctgaatgatataatgcgtaatcaggctatctacgatctagatttcaacagtatgcatattgataccggtgcatggcccgatagcaaactgcaattctcaccgcgtgtgggtttcacctgggatgtgttcaatgataagactttaaaagtgcgtggtggatcaggattcttcaccggacgtattcctctggtgttctttaccaatatgcctaccaactcgggtatgattcaaaatctggtaagtattacgaccagatataaggatggcgttgtaaccagtcgcgatccccgcctggaattactgaaaggtaatatgataacagacgtaaaccagatgatttccacattgggacttcctacctctatcagtccggaagaaggtgtgttgccaagctccgtagtgggtatagatccggacttcaagatgccgcaagtctggaaaacctcattagctctggattaccagctgcctgtatctttccctctgacggttacactggaaggaatgttctctaaagatatcaatgctgtacgccaatacaactacaacgtacaggctccggataaagatacatggtcacgttttaacggaccggatgatcgttacatttatcccgaaaacttcctgcaacacacgaatatcagtaatgcaaacgtattgaccaacacttccaaaggttggggatggacaggcaacatcaccgtaatggcagaacccgccaagaatgtgaacattatggcagcctatactcataccgaatcaaaggaaatcagtggtatgcccggttcggatgctaattccgcctggacaaacgttccatccatcaacggaccgaacaactcgggactcatgcgttcgcaatatgtcactcccaaccgtgtagttgcttccattaactggcgcgtacatttgaataagaaaacatcttcgaatttcagcctcttttatagcggatattcatccagtggctacagttttatgtactctaatgatatgaatggcgatggtgtgaccaatgatcttatttatatcccgaagactaaagatgaaatcaagttcacaagtgcggaagatgcagatgctttttggaaattcgtgaatcaagacccttatctgaagaaacataaaggcgaatatgccgaagcttattctgcacgtgctccctgggtacaccgctttgatttccgttggagtcgcgacttcttcgtgaagattggcaaaactaagaatacgctgcaactcagcctggatatcctgaatataggtaacttgctgaacagcaaatggggtgtaacgaaaaacatgtccggggctaatggcggacgaattctgacctataagggtaaggatgagagcaacactcctattttctctatgtacaaagacagtgacggcaattatcctaccgaaagcttcacccgaaacctgaattacagcgaatgttggaagcttcagatcggtctgcgatacgtattcaattaaagattcagaacttatatttatcaaaaagaaaaggtgcaaccggtatgtttcggttgcacctttttgcatttataagatattaaaggagagagaattttatttattttttctccagagtttactcatatcttccagagtcttacccttcgtttcgggtacccaacgccaaacaaagaaggcagctgcaacgcagatgatgccatacaagctgtatgcgaacatcggactgaagtcgtacagtgctgggaatgtggacgatacaatataattgaatatccattggaaagctaccgcaatggccacagctttaccacgaatggtattcgggaagatttctgaaatcaatacccagcaaatcggtccccatgacatcatgaagaatgctgcgtatacaattacggaaaataccggaagaatacccttgattcccatgctgtcgcacattgccactgcaaatgcacctactgccataccgatagaaccgataatcagcaacggcttgcgtccgaaacggtctacagtaaagatagctacaagcgtaaatacaatgttcacaatacccatgataacagtctgcatcatgccaccgccttcagcacctgcactttcgaaaatacgcggagcatagtataatactgcattaataccaatagcctgctggaatacggaaagcatgataccgataacaataactgccacaccataagagaacaacttctcggtcttttccttggaagtagccttgatttctgccagaatttcttttgctttgtttgcaccattcaccttctccagaatagaatatgccttttcgtcctgatgtaccaacaccagataacgcggagtcttcggtacgaagaaaagaaggaagccgaataatgcagccgggaatgcttccgaaccgaacatataacgccatccggtttgcacgctccacatatccgaagcggcattcactgacaatataccttcagcactcttgtcgataataggattcgtgtggtcgcccatgatcaggaagttgacgaagtaaaccaccaacataccgaagataatggcaaactggttacaagataccagcgttccacgaatgttagagggtgcaatttctgcgatgtacatcggacatacggcagaggcaagacctacaccgataccacccaatacgcgatacaaattgaatgcgatgagcaattccatgtttggctcaccgtagttgaagaataaaaattcgggatagtaagaacccaatgcagacaggaagaacagcacggatgccagtctcagcgaattgcgtcgtcccaggcgggaagcgaagaaaccggaaagagcaccaccgatcacacaaccgataagtgcgctggaagaagtgataccgtgcatcaccttgtcatattggaaatccgtagccatcaggaagaaagcttccaagcccttctccgcacccgagattaccgccgtatcgtaaccgaacagcaagcctcccagaatggcaacggttgtaatagaatacaggtagagtttactaccattgttagcatcattcatgataaaaaagattaggttgataaatgagtaaaaagtgataaagagataaggtggtagagtgccctcaccctaccaccttattatattagcaatacatattcacgattgcttcatacaattcttgcttaccgctggtttgtttcggttcgccattagctttcgcataagctacaacatcttccaaagacaatttgccttcttcgaattccttacccttgccaccgtcgaatgatgcgtaacggtcagccaacatcttcttgtaaggagattcttccagtaatttagctgcactttccagagcacgtgccatagcatccatacctgcaatgtgagcgatgaagatatcttccaggtcggtagagttgcgacgagtcttagcgtcgaagttagtaccgccattacccaaaccaccgttgcggatgatctgcatcatagcctgagtcaattcgtagttatcgatagggaattggtcagtatcccaaccgttctggtagtcaccacggttagcatcgatagaacccaacatgccgttgtcaacagctacagccaattcgtgttcgaaagtatggccggctaaagttgcgtggttaacctcgatgtttactttgaaatccttatccaagccgtgagctttcaggaagccgatcactgtttcagtatctacgtcatactgatgttttgtcggttccatcggtttcggttcaatcaggaaagtacctttgaaaccacgagcacgtgcatagtcacgagcgatagtcaacatctttgcaaggtgttctttttcacgtttctggtcagtgttcagcaaagacatgtaaccttcgcgaccgccccagaacacatagtttgaaccacccagttcgatagtagcgtcaatagcgttcttgatctgaacagcagcgcgtgctacaacgtcgaaatcaggattggtagcggcaccgttcatataacgtgcatgaccgaatacgttagcagtaccccacaacaacttgataccagtttcagcctgtttttcttttgcataagctacgatagctttcaagttagcttcgtattcttcgatgcttgcaccttcagaaatcaggtctacatcgtggaagcaatagtattcgatacccatcttctgcatgaattcgaaacctgcatccaatttatttttagctgcttgcaaagcgtcagagtcaccattccaagggaattgtttcgttccgccaccgaattggtcaccaccttctgcgcagagagtgtgccaccaagccatagcaaacttcaaccaatctttcatcttcttacccatgattaccttctcagcatcgtagtaacgatatgccatcgggttcatactctctttaccttcgaatttaatctttcctattccgggaaaatactcttttgttgccataattttaattgaattttaaagggttaattatgttttgattgttaactgtactattctaattcccctcgttttcagaggagagtaaagttagcattattttgccattgatttttccaaacgatacttccagcgtgcataagcatctgcatattcttggcgcttagcctgattaggctcgataacatccagtttttccagcgttgcgaatgcctcgttattatccttatagatgcctgcaccgatacccgctcccttggctgcacctaccgaaccatccgtatcgtacagttcgattacagctcccgtcacacctgccagcgtatcgcggaagatggagctaaggaacatatttgcatggcctgcatggattttctgtacagggatgcccataccttccataatatctataccatacttgaatgagaatacaatgccttcctgagctgcacgcacaatgtgttgtttgccatgcagattgaagttcaagccacggatggagcagttgatctctttattttcgagcatgcgttccgcaccgttaccgaagggcagaatactgatacctgcactaccgataggagcttgtgatgccagtacattcatttcattgtaagagatgccttcgggagcaatcgtacgtttcacccaagaattaagaatacccgtaccattgatgcaaagcaacacacccagacgggtttgttcgtccgtgtggtttacgtgagcgaatgtatttacgcgtgatttcggatcatagttcacttcaccgttcacaccatacacaacgcccgaagtgcctgctgtagaggcgatttctcccggattgaatacattcagtgaaagagcgttattcggttgatcacctgcacgatatgtgatcggtgtaccctcctttaatcccaattcttttgctgcggcagcattcacacggccttgttcggagaatgtgggtttgatgtccgcaatcagagagttatcgaaaccataataatccatcaggaagtcggctacacgattgtttttgaaatcccagaacataccttccgaaagtccggaaacagtggtacagatttcaccgctcaacttcatggcgatgtaatcacccggcaacataatcttataaatccgttcgtagatagccggttcattttcctttatccacgccagtttagaggcagtgaagttacccggagagttcaacagatgtgagagacatttctcttctcccagtgtttcgaaagctttctgtccgtaaggcacagcacgcgagtcacaccagattatggaaggacgcagtacattctggtctttgtccacacataccaatccatgcatctgataagagataccgattgccttgatttcacctgcgtttgcacccgattcattcatgacagcctgtgtggcaagttttagattttcccaccagctttcgggattttgttccgcccagcccggtttaactgcaatgattgccgcctctgtcttcgggaagaaagcagaagatacacatttgccggtttcggcgtttaccaggctcgcttttacggacgagcttccaatgtcatagcctaataaatacatggtattaattatgagttttgatttatgaattattttattaatacttatcttcttaccttattatatatcttcttatcgaatcgataatagcgtgcggcacggtgggcaactccctgttgtttttcctccaatggaacaacgtattccatcatcgctattttcttgtggaagttccgcacgtcaataggcttgctatatatcaattcatataaagtacgcagttgtgatgccgtaaacttacggggaagcagatcgaacaaggctgacggattaatctccacgtactggcggatatataccaatgcttctttaataatcagattatggtcgaaagccaatgccttaatatcttgcagtgccacccaatatgcttcgaaatcagccagattccgactcagtgcccggtctatcttcaccaatgacaggtaagcaattgtaacgatacgctccactctcgattgcatggcacgttccagccaatgaatgtctttcgggtccttcgtcctattcttagaaccgaatgccttgaattgcatcagattgacgttcttcaaacccgttagttcgttcaacacacgctgggcagcttcgtccaaatcttcatccatatagatcagacttccgggaagcttcatatcgtggaaaatttcaccttgctcctcacctacacgttttatcaacagaacttttaattgttctccgtcaaagccaatcactacacagtctactgatatatgattgttcgctaatggggttttatgttccatgttttgcataatatccatgtttaagcgctgcaaatataaacaggttttttgaatatacaagcgcagaaaacttaatttctattatgttataaagcactatttttcaatatgatagatatcgtacattttacaatatcaaaatatggtcttatcgttgaaagtacaatatgtattgttgataaacggaagaatcaggtaattgtaggaagtacaataagagtgaagtgctttatttttaaggattttagtataccggaagattaaaaagacaagtacctcttattgtattttagttgaagtgctataaaaagattttttttctcatctatccctctgcttcccaataaactcccttctccgaacggagggagttaaaatagcttattgcacaaaaatccttcgtttgtgcggtcaatatcagaaaaagctatacctttgcaccacttttttaattaactactaaaacaagaacagtatgaaagcatttgtatttccgggtcaaggtgcccaattcgtaggaatgggaaaagacttgtatgaaaactccgctttagcaaaagaattgtttgaaaaagccaatgatatcctgggatatcgcattacggatattatgttcaacggtacggacgaagacctgcgtcagacgaaggtaactcagcctgctgtattcctccactccgttatctccgcactttgtatgggtgatgattttaaacctgaaatgactgccggtcactcattgggcgaattctctgctctggttgctgccggtgcattgagcttcgaagatggattgaaactggtttatgcccgtgccatggctatgcagaaagcttgcgaagcacagccctctacaatggcggctatcattgccctctccgatgaaaaagtagaagaaatctgcgagcaagtaaccgctgaaggtgaagtttgcgttgcagccaactataactgcccgggacagatcgtaatttccggttctatcgaaggcatcaacaaggcatgcgaactgatgaaagctgccggagcaaaacgtgctttacctttgaaggtaggcggcgctttccactctccgctgatgaatcctgcaaaagttgaattggaagcagctatcaacgctactgaaatccacgctcccaaatgtccggtttatcagaatgtagatgcattgcctcacactgatccggaagaaatcaagaaaaacctcgtagctcagctgacagcttctgtacgctggacacagactgttaagaatatggttgctgatggtgctaccgacttcacagaatgtggcccgggtgctgtactgcaaggtctgatcaagaagattgcaccggaggtatctgctcacggtattgcataatccttaaatacaacatatttgtaagggctgtctttgtaaccaaagacagccctttattttgtaatcatactatccgcattcagaataggaagataaacagcatctcaacaaaactttttcatgtaagtatggaagttctacattcaacttgcgttatctttgcaaaaacatgcatgatatggagaaaatcgacgaatacagaaacacccttgcaatgcctctttgcaaactatcaatagataaactggtgcaggaaatatgcctgcatccggaataccttaaagatatataccagttgatttccgatgataaaattgtcgtttcatggcgggctatatgggcatgtgagaaagtgagtgagaaacatcccggttggtttgttccattgctggatgatgttattcagcgattattagtctgcaaacatgatggttctaaacggttgctgctgtctatattatacaatgtacctgcatctgatcctgtctctgtcgatttgctaaattattgcctggatcatatgttggcgccacaagaaagtatcggtgtgcaggcattatctatcagaatggcttaccagctttgcaagtctgagccggaacttttaaaagagctgcaactcatattagagaatgcagataccgaatattactccacaggagttaagactaccatacggaatattctgaaaaagataaataaataagttcccatttctacatcccttttttcactcctaatttgatgagcagcgcattcattgggtatgcacatgcaaatcctatcaacatggctatctgcatcataaaccagaaagcccatgtatcttttgccaacggaatatctttgaaaatcacaaaatatacgattgccatccacccatacatacccacttgccaggaaagtaatgagaagaaatccgccttgaatgcccgtatgagtcctgcggcgacagatatcttttccatctcccttatagcatagaattgaaaatatatcccgataatcaatgccaggataaagtcgaatacccagttaccgataatcatgctaccacctatactgattgggaaataacatgtaatccattcaccaataatatctgccaaagtacaacccgcaccgcaatgcagagccgacaaagcaatagattgccagtgcggacgatccatatttcccatgggcctattcatcggcatatctttcatgctcatatccattttcatatcagcccccatgtccatatccttaccgtcctcctttggtgcagtctccatcccgaacttaaagtaagcccagagagcgagataacttgcccaaagtgcggtaagcacccacacaacattcatgattttcatggattgtttattctgtaccaaatcattggcgataatcagggcaatgacaaagcccgaacagatgaaaaacaatgaaattgttgtaagcataactacgaagttttaaagtgaatagcagagaaacagcttataacagaaaaggttgatatatagaatgaaaaaacacttaaagccgcaacttttcacgctaaatgatgaatggtgcccctaaattatctttctgtaatccccatcacttttcttcttaaacccattacttagcaatacctttattgaagctgcgttttcttcggaagggtctgctgctatttcacgtcctcccaattcaatgatcttctcttccaacttccggataatcatcttaccgacacctctattcagatactcttcttgaccaatcaaatatccaatctcgtaagtatggttcttttcgggtatgtctccatacaaactctcaaagtcgtgcccttcttcctccaagtctttcaagaaaaaacaatcagcaaaaagacaatacccaatcttcttatctctgtagtaaacaataaaatgtcttatgaagtcatacttaccatttctgttgtttacctcatccagccaagcctctctttgttcttccccatccggacacagccacttatagatataatctttactcaaccacctgtcaaacaacggtatatcttcgtcaagcaaaggctttaatacaatttcatccttatcgatcataagcttattgaagttattttcatgtttattcaacccgattccctttcacatctataaagaaagcttcaccgttcagtttcacctttgcttttccatctttattaaaatagcgggcatcatcatatataaaaggaataacctcttcccctgtctgatctataaagccacatttaccctccatgcatactgctgccagcccggttttggtaaaagaccatgcaggattatatatacatggaatcacttccttccccgttttatccacataaccccaccaaccattctgcctgactaatgccaatcctacagaaaaggcatgggcatagtcatagataaacggcacgacttcttcgcctgttactgcatctataaagccccatttaccattatattccgttggtactaatttttgtactttcattttttgagtatccataattgctgtaatccgttaaactttgaattgataaacaagaaatagttcagaggaatgaacttacccatattgcggaacattcagaatcagcatacagagtatgctcagtgacaaagataaagataaaaagcgagaataaaacaccggttaagaagaaagcttgtgaaacgaagcgcaatcagaaagaaaaaacagatttcaaaagaataattctccgctttatgctatttttgcagaaagcgcttaaaaagtattcttatggattataaaataaatgccccgaccgatggagatgagatgatattcagacatgcggatatatttttcagttgtttcttcaatgacgaaaatcattgtgtacatcaatcccgcgagcacgccatgaactatgtttattcaggcgaaatgctcattgatgacgggaacaaaatcacccatgtacagaaaggcgagtgtgtgtttatccggcgcgaccaccgggttacgctgactaagaaaccattcgatggcgagcagtattgcggtatttttctgatgtttacacggcgtttcttgcgcgagatgtttcaacgaattccttcggataaagcgctggacaatgtgcccaaagtccgttcaagcgtgataaaattgcctatcagcatggaaattgacagtctgttcacttcgatgaccccttacttcaaccagaagctccgggcacaggacgatttcatgaatctgaaattgcaagagggactgctggcgttgctacatatcgacgaacgcttttatcccacactctttgatttcaacgaaccctggaaaattgacatcctggaattcatggaacaaaattacatgtacgatttcagtatggaagatttagccacgtttacgggacgcagtctggctacattcaaacgggatttcaagaagattagcacccttactccgcaaaaatggctgattcacaaacgcctcgaagcggcctacgagaaaatgaaaaccggcacacggaaagtacaggacgtttatctggaagtaggattcaagaatccatcccactttgctacggcttttaaaaagcaattcggcgtctctcccaccgctatctcccaataaatttccgtgagttgcgattgatatagtaaattgagcttctgagaaagattctttgagcctcgcagcaaatctgctgcggggcttttgcgttaactttgcattgttgaatcaaaagacaaaaaacaatgaaaaaagtaataatgctaatcatgcctctgatgctgacagttgttagtgttcaggcacaaaatcaaaaagaaatgaaaggtagtaatattaaagcacaagagttagttctcacgcaggaatgggacaagactttcccacagtccagcaaagtgaatcaccgtaaagtgacgtttgtcaaccgctatggaattacattggcggcagatctctatgagccgaaagatgcgaaaggcgcattggcagccattgcagtaagtggtcctttcggtgccgtaaaggagcagtccagcggattatatgcgcaaacaatggctgaacaaggtttccttactatcgccttcgatccctcatttaccggcgagagtggtggcgaacctcgcagggttgcttcaccggatatcaacacggaagattttcaggctgctgtcgattttctctccacccagccgaatgttgacccggaacgtatcggtattatcggcatttgcggatggggtggtctggcacttaatgcagctgctatcgacacacgcatcaaggctactgttgcctctacaatgtacaacatgaaccgcgtaaatgcaaatggctattttgatgccgacaacaatgaaaacgcccgttacgagaaacgcaaccaactcaatgcacagcgtaccaaagagtatgcccagggttattatgaacaaggcggtggcgtggtcgatccgttgccggccgatgcacctcagttcgtgaaggattattacgattattataagacacagcgcggttatcacaagcgttcgggcaattccaatgatggatggacagttaccggcccaatgtcattcctgaatcagcccattcttgcttatagcaaagaaatccgctctgccgtactgattatgcatggtgaaaaagcacattcccgctatttcagtgaagacgcctaccgcgatatgacctcttacaccaactatcgtgacaataaggaacttcttatcattccaggtgcctcacacaccgacctttacgacggtggaggaaaaaatgtcattccattcgataaattggcggcattcttcaacgagaatctgaaataagaaaatccgggaaacgtggaagatgatttccatcgtaaaatagcttactgaaatttggcacgccgttgtgaatcaactatatttgtacattcattataagtactataattatgcaagattttgtaaacggacgctgtggttggtgcggaactgacgaactgtatgtgaaatatcatgatcaagagtggggaaatttagtgaccgacgacaagacgctgttcgagtttcttgtgctggagagtgcccaggccggattaagttggataacgatcctcaaaaaacgtgagggatatcgcaaagccttttgtggtttcgatgccggacaggtagcgcaaatgaccgatgaggatgtcgaacggctgatgcactttgatggcattgtaaagaaccgtctgaaaatcaaatcgaccattacaaatgcaaggttattccttgccatacaaaaggagttcggtagtttctatgaatatacactgtcgttctttcccgacagaaagccgattatcaatacctttcaatccttgagtgagattccggtatcatctcccgaatccgatgccatgagcaaggatatgaaaaaacgaggattcaagtttttcggatctaccatctgctacgcccacttgcaggctgcgggattcgtcaacgatcatctggcggactgtatctgtcgaaaaggataaatgacagtataacttcatacaaagtaaaaggcggtatttccttgcatggatttaccgccttttcgttttacttctttattcccaaaatacttcttgctttctcttcactggagataaaatcgagtgcattgattatctcgtcataattctcccggtcggagatattcggagctaagattttcaggacttccagtttgtcatcatcaaaccggtatatcgacatcatccgcacacactgtttgcaacttaatcccctgttaccgattccggcttccagcaaatccagttgatcgtctttgaaaggtttgctcttcactttgttgtaaagagacaggaaatccctttcgttcatccctcttccaccactaacatgcggacgggaaggggcttctccaccaatttccacagacggataaactgctacaggaggattggtatacttctcgtaagaatccatataagtcacttttccatccacaaatccaaggtcgatgatcgttataccgggagctccggaaatacttttttcatatctccatccttctacttcgtgatcgaagctacggtgcatcggctgtcccaatatggatgtgatctcctctttagtcatccctttctgaattttcatcagggtattactgtcaatccctaaaatcatggcacaactacccatacagattgcaaatgccagtagtgctaatgtcagttttattgttttcattgtatatattgtttttagtttttatgttgctacaaatataagtggagaaaaacatataatattatctttttccctattatttagggagatttccctattttgccagtattctttttttcgttagcatcagctttgccaccttgtttgtattcacagggggagacgcctttatgacgcttaaaagtccggttgaaatatggcacattattaaaaccaacattatagcagatttctgaaaccgtcatcctcttctgcttcaaaagctggcaggctaaacctatacgatactcgttcagataagtgacaaaagtttttccggtagctttcttgaagaatatacagaaagaagcccggttcatgcctacataccgtgccacatcatcgagcgtaatgtcccgctttgcattgcagataacgtatgtctggatctgactcatacgcttcgtttctttgtcaatcctctgatatttacctaccacgtgctcactaccgctatctgccattatcaggatgagctttatcatggatgcaactctttcagcttcactttgattacacatcttttccaaaaggtcaatgattacctccgactttcccttatcgaatttcaccgcatcatgcttcttcttcaacttatctatatgtccgcacagttccggaaaagtaccggaacacctatcaaggaaatcgttgtcaaacgtcacggtaatgttcgcaatcctgccctgcgcatccgtatcatcgccctcaaaataccagcaatgcggaatttccggcggtatcataactacctctccggcaagaaaaggctccgtcatgtcgcctatcaacctcataccggaacctacgattacatacgaaagctcccaggtagattgctgatgcaaacctatctgttcatcgggcgcaagatgaacattctcgaaagtaaaagaacgtctttctgattggggcattatactataatttaatattctccattattttcctccttatacagggaaatatgcaaatataagacaattctaataaacgataagataaatgcgtaaactaattgagggataactttgcacgcgatataaaactgataatatcagatatctggataacttaggtcctgccaggtttgcgaaaatatggcaggttattttttagtgtgaaaatgaatttaatatcaaaataatgaatacaacaacttatttggcatcgaagccgcgctatgaaatactggacggactacgcggcgttgccgcaatgattgtggtagcttaccacttgtttgaaacttattctgcgggccctgtccatcagattttgaatcatggttatctggctgtggatttcttttttgttctttccggttttgtaataggatatgcctatgatgaccgttgggacagaatgtccataaaagatttctttaagcgacgcctggtacgcttgcatcctatggtgattatgggcacgttaataggagctgtctttttctatctgggcgactgttccgcttttcctctgattatggaaacaccttggtggaaagtcctcctgatggttctgctcggttgcctgatgattcccacaccagtttcatgggacatacggggctggtgggaagtaaactccctgaacggccctacctggtcgctaatgtgggagtatatagcaaacatcctttatgctttgtttatccgccatttctctaaaatcgccttgggaatctttgtcgccctggcagcgttgctgactatcgacatagcattcaatatagatacttttggtctgttggccacaagagaagcggctgcatatacctttatcggcggatggagccttactcccgatcaactctacatcggtatatcccgactactttatcctttcttcgtggggctactgctttcgcgcgtcaacaaactgataaagataaaaagaggattttactggtgctcattgctgatagctgccattttagttatgccccgcatcggcggtacggaagccatgtggatgaacggtgcttacgaagctttttgtgtacttattatgttccctttaatagtagcgatgggagcaggcagcaatgtgacgggaaaacgttccgtagccatctgtcaatttctcggagagatctcctaccctctttatatcacacattttccgctgatttatatgcagatagcctgggcacggaatcatccggacgcacctttaggcatgcatgttttgcttgcagtttccatcttcattttatccatcgctatcgcgtatgcttgccttaaactgtatgatgaaccggtacgtgaatggttgaaaaggcgttttttgatgaaaaaaaggtaaaactatggcgaaaagcatctttttcttatctttggcacattaatatgatgaataagtcatctctgtaatgacttgaatgctctaaaaatcagtagatctcaatatatgaaaacagaattggaaaagtgcttagccggagaaccgttcaatggcggtgacaaagtattggcagatatgacgctgaatactaaaagattattgaaacagctaaatgaaacggattatgccgacacggaacagagaaagcgaatctttcatgatttgttcggcaaaatgggagaacatgttcacatcgatattgatttccattgcgaatacgggaagcacattttcatcggtgatcaggttatcatcaacatgaactgtacgtttgtagacaacaatatcatcgagataggcgacaatgtgttgatagcgtccaatgtacagatatacacagccacccactctaccaaattacaagaaagagtcgtggcggattgggaagcaggagaaggtatttgcaaaacctatgcactccccgtaagaataaatgatggagcgtggattggtggtggtgcaataatcctaccgggagtgacaattgggaaaaacagtgtcataggtgccggcagtatagtaacccactctattcctgataattgcgtagctgtgggaaatccttgtagggtgattaaacaaattgacaatgaagtagtttaagagaactatcacaatgtattattgatctgtattcctcaaagtatttaagctatactttgaggaatatttttttgtgaagacctgattttagaatcatttcaatgccttaccatccgaaaaagccttacccaccttttcgcccaccttcagatagtcgttgttaaacggatcgaagatgatgggagctactttggaagcatctacttttccattttcatcaagtacacgctcgtctacacttacatttacgatctctccacgcaagatgcaggtttcgggattgtaatctttcagtttgcactccaccgctacggacagttcgtcaatcagcggggcgtccacgaactccgaacgggtggcatggaagcctgcacgggcgaatttgtccgttactttattgccggaaacgatacctacataatcgcaggcaacaacctgccccacttccgccatacttactgtaaatgctttacgcttcaggatattcgcagtggtcttgtgtccttcgctgatgcaaatactgatctctttcatttcactgataccaccccaagccgcattcatagcgtttgggagtccattttcatcataagcagcgatgataaacaccggctgcggataagaaaagggttttgctccgtaattctttctcatactaatttattttttagtccattgtttaatgtcttctttggttgcaccgttcagcagtttgcctttctgccacttcagattggaataagttttctgcaactctttttcggaattggagatactgcttccgcccgacgtggcaaacagaatcactgtcttacctgaaaaatcaccactttctataaaagtattgatgattctcggagctaaattccaccagatgggaaaaccgatataaacagtatcatagtccgccaggttctccgctttggagcttaaagtaggacgtgatttggcatccgccatctccacactgctgcgtgaggacttgtcgtgccagtccagatcggcagaggtgtacttcttcgcaggctgtatttcgtagagagtgccacctgtgacttctgcaactaccttggctgctttttctgttgttcccgttgccgagaaataggcaaccaatgtcttagaactttgtttctgtgcgattgcggtcaaacataacgccataatcgctaccataaagaatgtaagtcttttcatacgatatattatttagttcaaacatagattacttttccgtagcaaacgcttcgattcgggaagcatattgcaatgatacaaaattacggagtattatccagtatgcaggtatataaattacagaatatataaccaatattacggataaaagaaaaggtgggcatgtaaaatgtaaaagcagattgccctttcgatttattttgtaattttacgagcattctttcaaaagaagtgtaatctataaattctacagctatggatcggtatctaaagaaattctggggcaatcattttcagtttaattggaaattaggcgtatttctcatattgttattcggaataccccgttttataatcgtgctacaatcttatgtggacagaagttacggcactgtcatgttcgtatttttaagcatgtggattgtcccgttcattcttcttacaaagtatggtcggaaaggcatagggcttaaacgtcccgcgcattggtggagaataggagtttcttttctgtccggcgggattatttgcttggtcatattcggtttattttcttttctgtatggacaatctgtcgaaaacgcatttgtatatatcgggggaaataatcccagcagtggtataacaggagatgataaattgctgtacttcacaatcgctgttattccaagcatgatatttagtccgataggcgaagaattcctgtatcgaggcattattcatgggtgctttgtccctaagttcggagagacaaaagcttcatactttgattcactggcttttgcattaacgcatgtagcccatttcgggatcgtttatacactggggacatggtgcttcttaccgattcctgccttgctttgggtgttttcaatgtttatagtcagccaggtgtttttcagatgtaagctgtattgtgattcactttggggagcaattgcggcacattcgggatttaatttcgtaatgatgtatggtatattctatttgttataatcatactataaaactccgctggatgtaaagcgtgtatctggtattgcagagattatccgataaaaagaatagtctctgcattttttttatgttaaaaacacaaatgactgtcacaatcctcttcggcccatgtctaaatatataaaacagaaatcatgaaaatagaaatctatcatgtggaccaagcgataaatggctctaaagaggcattagaagcaatcattgaaaatattgaaggcccggtgtttaatttgtcattgcgcatgctcgggcggattgaagatgctgaagacgcaaagcaagacattctgataaaggtcatcacaagcctttcttcttataaaggaaaaagtttattttcgacatggctgtataaaatagccgtaaaccatttaatcaatgagaagaataaagacttcgtaaatcatcctttgtcttttgaaatcttcgggagtgatatagacagatatgtcgcctcttcagttgaccaaacgaatccggctgagaaaaacattttctcggaagagctgaaactgtcatgcaccaacgttttgcttcaatgcttaaatccattcgacaggttaatcttcattttgggaaccatgtttgatgtagacagccgactgggaagtgagattacaggattgtcggctgacaacttcaggcaacggctgtcacgctccagaaaagtaatgagtactttcttgtcagaatattgcgaacatgcaggaggcaagaaatgtaactgtatgaaccgggtaaattatgccctcagccaacaccgtatcgatcctgccctgccttactcatcatcattgataccggagagaatctccacatcgaagtctgccatggaaaacattgatgccgcgacagccctatattcaaacttactcagacattcttctaaacagcaagccaaagaatatcttttcaatttgcttaaaacggatgatttttcatcactaactaaataatatctgacatggacaaattacttttctcggcaattataggattggttgccggagtcatagacatcattcctatggttatgcagaaacttccccgctactccatcgtttcggcgttttttcattactttttcgtttcaattattattctcaatgtagacattcctcatattctctggtggctggaaggaggcgttgtaggcttggcactaactatcccgatgcttattcaggtaggacattcggataagaaatctttgccaataatagcattcaatgccatattattgggaacattggttggacttgctggacactatatttcagttttctaaatccacacagagcaatgtaggattcgagtcatcctcctcactggctaagccatattgagccaacttatcagcagaaagcaatgtatatgccttgttgttccggataagggaaacgggagtatttacaattgctttctcattataaggcatggcatatcctttttccgaatgagtcagcaattccccgctatttgtatcccatagtgtataatgcctgctctcattccagaagaaatcataaaacaacaggtcattcaccaataaagcatttttccgccttaatacaatatttcccttccgtaagcatacgttcaagatcaccattcaaatctgtcggcatctttagcttgccctgattgatggctacagcgggaatgagtttttcctttctactggcatacaacgtatcattaatcacgatacacacttggtcgtttccgtctctgaatctgggcacaatgtagccacctgaaaagcccgttaccgattcagcatcgaaaggaaagaaagattgtttcatgttccagtccttatcaaagaaggctactaagtgcgatttctgatattctcttttgtaggttccccaatatccgttggacacacctataaagttggatatactatctttggggtattcgctgacgaaagtcccgtccggtttatataatttagtcttattaggagtagcaacataaatcaactctttttcttcatcaaaaaagcgggaaaagatgtcggcatattcttcaggtccatttcccttcctgtccatcacagaaagaaaagaaccgttttcggcattaaagaaataaaaactcgtcttatctccgataactatgtactttggagtcacattaagcaggtacgcattagcactcaacaggcatttatcattcgtttccagccggatcgttttcggattcttgaaaagagattgatattgtgccgaagtgtagtccgcatcaaagtgttcgacgcctttatcaatactgactgtagaaacctgttcatgtgaacctttttctccggaacaagccgtgagaagaaaaagagagatgctgagaaaggaaatacaagagtgtcgcatattgttttttgttatgttgtaagttgggcaaatttataaaaaaaacgaatatacaagatgttatcttagaaaaatgagaagaataaaaaaaaagaaaagtcggaaaaaccaacccaaatacttgacttcgcctttctgatgtagtatctttgtagagctttaaaaaactgaattttaatattaaacctaaaaccttagcaaatggcaaaactgattctttctttctccgaattggccggtatgtatttccccggttgttccactccgaaaaatgcggtaagatctttacaacgaagcattaaaaggtgtacaaatctggcgactgctttagttgaaacgggctatcaaccttataatcatcgctggctctctcccaagcaatacgggctgataatagagaatctgggcgatccattcccagaataataatagacaataaataggaaaggcggtaattcttcataagaatcaccgccttttttgttgatatttatcaaatttaggcttaaaagaggctttttacgtttttaataaacgttgaacacattctttaaaaacgttcccattattctttaaaaacgaataacaggaagctgaacaaggcagaaaaacgcctataatttgtccatatttaagactgtggtatgtattatttcacttagcacaaacgaactttacgttttcacaataccatacacaaacatagacaggttatcctttcactgcaatactaaatgttgtgatatggagaattacaggaatcactatatgaattttcctttagggaaatttagagttacaattgagttctcaaaataattagcgtataatttagcttttgcagaaatcagtaatttgaacacatttagctgaagagaatcactaacataagctccctctctatcactttctttcaaaactaaattcgaacatttttgccaccaacctatatgttcataaaaaggtgtatttctctgtgagcaagtaaacagacctatatcaaatctaccatcttgcataatccattccgttgctttccttactaacatactccctattccctgttctctatattccggatgtgtacaaacacagctcaacccacacattttaaaagttttattttttacgataatattccatgaaacaactcctaaatagccaataaattcattcttttctatagcgcaaaatgacatgacattcatttcttggggatgaatatcttctatatttatatcctcccaaataagataaagcaaactttttaataattgtttatctatttccgtaatgttattatattgaaaactttttatatccataatgacccgttccgatacttggtatctcacaaaaaaggtaaaagagatacgtgacatggtttgacaatcaaaagaactattttagattctacgataaacttcgtcaaacggtactctgcaccgttctccccagattcctttatttccgtcccgtattccacaggggataaccatatttatttcagcaccatgaggcaatttcagtattctttttagccgacggctatctaaaccttccagaggacaagtgtcatacccttcgtttgccatagcaatcataaacgtttgggcagcgagtgcacaagatttatgggcagtcacgcgcatatcattttcggagacttcgagcatcatcgggcggaaaatgctgatgatgttaaccagtaattttctgaataatcccaaaactccaaagaaacgggcataaacaaacggcatcaatttaccatagtataattcccggtctttgatgcgtttggcctgacgctctttcggactgtaacgccggatattctcccgctcgaagtcaagtacaaaccgcgcatgtttcctgtaccaatcacgccgcaccacgaaaacaacgatttgtgaagctgtagaagtggctttctgatcgagacaagctcttgaaacctttgccagtaattcgggctgaatgatatgatagaactcccacaactgcatatccgagctgttgggagctaatgttgccaattccagataatgttttattctttccggatctatcagttttgttctgtcatacgctcgcacagagcgacgataatggaggacttcgtctaaattcataatgctgtaaatgttataatactattatacttttccttagagctaaaaaacttcaggatattcatagaattaattctatagtataagattaaaacagccccataagctaattgttcctcaactaaccggacttttcgtgtaatcagaatgatcgatgtgctgtatatcactaattcgtgatgagatatttaattacgatgtcctatattcattcggtgaacatcctataatacgcttaaacgctttactgaaatattgtggatattgatatcccaaagcgtaggctacatcactgactgatttgtttgggtctgcaagcaattcttttgccgcatccattgtttttgtcagaatatattcctgagcagaagaaccagtctctttcttaatcagatctccaaaataatttgcagacagatgcagttggtctgcacaataagccacggtcggcgtaccgaatttagagggtttgtccgacgtgaaatagtcgttcagcaatgcttcgaaagaactaagtgcatctttgttctcctttttacgggtaatgaactgccggtcatagaaacggatgcagtagtttaacagcaattcaatggccgaagcgataatcagcttgctgtgtttgtccgttgctcccttgatctcctcgccaattttcatcatacaatctatcacggtctgccgttcctgtttagaaagatgcaatgcctcattaacggcataggaaaagaacgtgtaatcctgcatgtggcggccaagcggtgtaccatgtagcaattcgggctgaaatgtcagccaccaacctttgggctggaatgactctcctgtatcgtcgttgccgataatctgtcccggagcggcgaataccagtgtctcttcctgaaaatcatagaatttacggccatactttatcacatcggcgcacttgatgtccttcagataaatgacatagaagccaatgtttttgcagacatggcgcaacgatttgattttggaagcgtcgattacgcttaccaacggatggggagtttctatacccagaaaatcattgtattctttgatcgtattcagctttataatcttctccataacagtggatttcattgtttttacgcaaatatataaaatatcttcgggcgatctgtttcaacctgtaataattatacgtgaaaccgtaatttataccctatggaactttcggatagcccgtaattttgcatcatggaaaaataaatagaaaaaagaacagtgatacaaatgaataattccggacttatgactattgatatgttcaataaattgacggggcatgaaacgctgcatccgcagatttgcatgattgatctgtcgaaaacgaatttgagtgagaatattcggataatgtgtgatttttacgggttactgtattacaactctcccaagcagagcaaagcttcggaaaaggaatggttacggctggtttatcccggtgaggtggtcgagataccctcgaagcaacaccggcatgccgactactattcgggtgtgcttttccatcccgacctgttgtgcgatacatcacttgaaaaccgtatcgaaacctatccgaaacgctgccgtttccggggtgcactgacagagcatgaacaacaaatcataaccgataacctgcgggagattggcgaagagttgcaccatgccatcgaccgttatagtgcatcgatcatcgcctcacacatcgaattgctacttaactactgcgtacgcttttgcagtcaataaaataaagaagatgcagcaaatccgtaaaaattatccttcaaaccgtaattcatgatcggtcgaagcgaaaattccagcctaattttgcattagataaaaacaggaaatataaaatgatagagattatgaaaataaaaacaagaattaggacgatactgatctgtatctttttcggatatggaatcgcagccgcccaaaaccccaaaatggaacaagttatgaatagtaagcggaaacacattgcagaggtcgccgcccttacgggtaagggagacctcgataaattgaaactcgctcttaccgacggattaaatgacggaatgaccgtgggtgaactcaaggaagtaatggtgcacgcctacgcctattgtggttttccgcgtgccttgcgcggactacaaacccttgttggggtactcgatgaacggaaagcaaaaggtatcgaagataaccagggtcgtgaagcatcgccgataactgatacccgcagcaagtacgaacgcgggcgtgatattcttgccgagatttcgggtgttccggcagatgcgccgaaagccaattatgctgtactggctccggaaatcgaagtattcctcaaagagcacctctttgctgacctttttgagcgggatgtcctgacatacgccgaacgggaactggcgaccgttgccgtgatcgcctctttgggcaaaggcgtagagccgatgctaaaagggcacatgggtatcgcactgaatgtggacgtaacaccggacgaattacgtggtgtgctggccatcatcgaaaaaaacatcggtcgcagcgaggctgatgccggcaaactaatattgaacgaattgctacaaagtaaaggagtaatcgctgattcccaagccccggccgtggcagcggagaatggcgtgaagaaacagaaggtaacgtttcataaccgtttcctgattgatgtggttggcgatctttatttccctgcaaactacgaccctgcaaagaaatatgctgccatcatcgtcggtcatcctttcggtggtgtcaaggaacagacttcgggactacatgcccgtaagttggcggaactcggttatgtgacattggcttttgatgcttcctattatggtgagagcggcggttatccgcgtcgtatcgagtcgcccgaggtgcgggtggaagatttcagcgcagcggtcgatttcctcacgaatcatccggctgttgatgccgataagattggtgtcattggtatctgtggcggaggatgttattccgtcagcgcagcgcagatagaccatcgcatcaaggcgctggcaacgatcagtatgtacgatatgggacgtgcccgccgtcagggtgtgggcgattcccagacgtatgaacaacgtatggcaattctcgatgagatcggtcgccagcgtacggcggaatatggcggagctgtacgtaaggacatccgtgccctacccgaaaaagtagatgaaaacacaccgaagtttgccatcgacttcctcgattactatgacaatccggagcgtggccagcatcccaattctacgggctattactcctacacgagtcttgcaccgatgatgaacttcttcccgttcgcacagatcgagaccatatcgccgcgaccggtactcttcatcgtgggagaaaacgctgtatcagcttacttctcggaagacgcatacgcaaaagcagccgaaccgaaagagctgtttgtcgtacccggagcaacgcacgtagatttgtacgaccagccggagtatctgaaaatcacgctgcccaaactggacacattctttaaacaacatcttaaataatcatttgaatatgagaaaattattttttattccatttttgttccttccgctgacgactatggcagcttgttcttcagacgacactcctgcaccgcagacggaacagtcgacaactcacgatgatactgacaacccatccggtaacagtaaaactctcgtagcctacttttccgcacaggggcacacgcaagccgtagccaaacgaattgtggaacttaccggtgctgacatatatcgtattgaggcagccgatccgtatgccgaaaatccatacgatgacagcgaccgtattcagaatgaggcttacaacgacctgcgtcccggagtggcgaatctacccgataaggaaattattgcgcaatatgatacgattttcgttggctcaccttgctggtggcatcagcctgctatggtggtttgcacattcctcgaagcatacgatctgaaagataaggttgttatcccgttcttcacttacggagccacaacctatctgaacgaatcaatgcagaagatttataaggtaactcctgagtcaaagcatcttccggaaacgcttcccgaagacctcaatccggatgacattactactcccggcccgcccgacgatgcaggtattgatatgccaggcggtgctaatggcacggaggcttggcttcggcgaatcggaatcatcaaataaaaaacataaaatgaggaaaatatgaaaaaaggaaatcttcatgtacggactccggttttgatatcctaagaatacagaaaataaaatctaaagaaggtatcaaaataaagcttagaacacaaattacacgaattatgcaaataattcattttttatacttcttataatcaaagcttatctgatttgttatttacgtaattcgtagaagtggctttctgatcgagtttcgaatctagctccaaatagtttattgtctcgttatgaatttggttatttttcaccattgtgtgaatggccgaaacagactatttttgcaaaaaaaataatcattcataatctattaagcaatgaaaagtaatactatttgtcaagtaattcttgcaggaagcatcatattggcttcttgccaatctaacaattctgctaagcaagatgagtctcaacaaacaatgaacgaaacagttatgaacaaagttacagattgcaaaatcagtgcgggaaacatcactttcactaatgccatcaatggagctgaaaattgcgtgaaactgcttgatgatggcgcattggaattccattgtgccgaaggactggatttcttcagtgacccgaatggaaaactgtcaaatacaacgcttcctattctgcttgtccccgttgagaacacgaaaccttttacgttaatagccaaggttactccggagtttacagcagagggattgtataatgcagccgacctttttgtatattcttgtgattcactttggcagaaactggcatttgaacaggatgaatacggtaaccaccgtattgttacagtaagaacacaaggaacatccgatgataataatcatgataaattaaatgtttcatctgtttacctgaagatttcatctgatacaaaaaccattgccagctattattccatcgacaagaaaagatggaacatggttcgtctatacaagaattgttatccaaagaacatctatttgggcatcagtagccagtgtcctcaaaaaggcagctgcacaagtcgttttgaagaaatttctttgtctcacgataatgttagcgatttccgcttgggagaataagccatttatattgaaggtgtaattcttaaaatggcatgacaaaagccgcagaatatttctactttctgaaaaagcttatgatttaagtatagttttggaatcaattgataacaaagaaaagaatcttgctcttatctttaaaaattataagaaagagcaagttctatcgattttcacaaagcgctttaaatcattcatttacaacttttctcagaaaaacccactccaaggcatcaaaagagtacaatacttcccgcactacatcctatctttgcaatgtcatcagaaataaatgatggcaagtgaaccctattttttttaaccaattaaactttaattattatggctttaaagtatgtagtgaccaaaagagtgtttggctttgacgacacaaagacagagaagtatgtagcgaaatctgtacgttcgggacagatgagttttagtaaaacgtgtgcaaaggttagtcgactttgcggaatccaccgaaaggtagtagatttagtagtcagcggtctggttgatatgatggcggaggatattgatgacggaaaaagtgttcaattaggagaatttggcatcttccgccccaccattaaggctaaaagtgcggatacagcggaaggtgtaacggcaagtaatatagtgcgcaagcgtattgtatttactccgggaaagattttccaacgtactttgggagaaatgagcgtgacacgttctattcccgttgatacagattatacggacggaagcagttccggtggtaacggcagtggcggaaatcaaggcggtggcaaccaaggtggtgacggtggtttagatgagaatccgttaggataatttccttgtcggagtgaaaaagtgagtagtgaagttcttttgctactcacttttctgctactataaaaatttcactgctcgacgtaaaatcattcttgccgagtagttctttataaatagatattttacggaatcctacctttctcaatatacttgttatttcttcctccgaataatatctttcccaaatgatgaaatgtttggctgtgtcttcaagtatcaggttatattgatatgcaaaaactttgttctccggataatggaatgtttgacttagaagtaaatattcactttcatcccagaacccaccgcaaggggcatattcccaatcccggctttcctgtctgtcatcaataatcccttccgagaaaacatcaaaaatgagaatacctccatcagtcagcgaaagatatatattgtccagcaatcggtcgcgatcactatccggatgggttcccatatcacaatagatcatggtgattgtatcatacttacccataggataattattgatgtagtcaccccaaatatagttgatttcctctcgttttccaatggcatattctatagaagctttattaaaatcaatgcccgtcaccatataatccttatctgctaaaagcgatgtgtacagtcccggaccgcaacctaaatcaagcaaatgactttggggctttgtgtgctggagtatgaaatccactatcttcagaactgattcccgcttccggcttgcaccatcagattgcggatcaaggtgatcttttaatatctgctgctgaatatacgggtcggtccaaatgttatgagcggacttttcaaataaaacaggtttatgatctatgattctcatgctttcttgtagatagttctttcatattatttattaatagctcattggcaaacaaatatctgtttttccgaatgattacaaaatactttttcttcaaaactgccaaacttatgaagaatttcaaaaccgttccattccaggtatgaatctaactcttgaggaaagaatagcctcatatccaaattttgaaccgaatcaaactcaccattaatgaaatagtgccattctatgcgattcatctgagttttgctctcgtatcgcataatctgctttatcaatacttctctcccatctttggtggtatattcagcaatttctatgggctctttttcatgttctacaatgtattggatattgggattaaaacaatctaacaaaaatatgcctccttctttgagatgatttttaaccacacgtaatgctttaaacaaatcttcattttgatataaatgatggatcgaattgaaaggaataaagacaaggtcgtatttcttctgtaaatcgagagttctgatgtcagcctcaataaattctatttctaatcctgctccggcagcttttattttcgcttgttcaagcatagaagcagtgtagtctaccccgctgatatcatatccttcctgtgctatcggaatagtaagtctacctgtaccgcaacaaagttcaagtatacaggcatccttgtttttaggcagccatcgcttgtaaaatagcaaatcatctatgtgggtattcattccatcataaatattcgcatcataaattaaatccccaactttataattgctattcatctgattcttcaatatctggtgagtactaatatttacttaaccatacaaaggtagtactatttgctttcataacgaacactatttcaactaattcactctactctgtctggatttgatcgttagccgaaaaaattatttttatatttttctcaaaattatttgtttaaaggtaccgaaaggggacaatctctcttgtaccgtatagtacctttgcaaagtcatctgaaacaaatgacaacagtaaaccttattttttttaacctattaaactttaattattatggctttagagtatgtagtgactaagagagtgtttggctttgacgacacaaagactgagaagtatgtagcaaaatctgtacgttcgggacagatgagttttagtaaaacgtgtgcaaaggtcagtcgactttgcggagtccatcgaaaagtggtagacttggtagtcagcggtctggttgatatgatggcggaggatattgatgacggaaagagcgttcaattgggagagttcggcatcttccgccccaccattaaggccaaaagtgcagataccgcagaaagcgttacggcaagcaatatagtacgtaagcgtattgtattcactccggggaagattttccaacgtactttgggagaaatgagcgtaacccgcgccattcccatcgatacagattatacggacggaagcagttccggtggtaacggtagcggcggcaaccaaggaggtgacggtggtatagaggatgatccgttaggataatgccaaattaaagtagcgaaagaacttcgctactttttttgtttccatacctatttatatggataatatctcttatttttgcacatattataactataaataggtaatatggaaacatcaaaagtctactacacagacctgcgtacctctcctacttccaatcttctggataagatggagcgcctggtaaagcgggcaggtattgaacagctacccttaaaagacagttttgtcgctatcaagattcacttcggtgagccgggaaaccttgcttatcttcggccgaactacgcggctcgcatggcaaacctattgcgcaacaatggtgcaaaacctttcttgacggactgtaacacactatattcaggccgtcgtgccaatgccgtcgatcacctgcaaagcgcaatggaaaacggttataatcctatatccgcccaatgccaggtcatcatcggagatggattgaaaggtacggattgccgggaaattcccttgaacggtgagtactgtgctgcccctaagattggtactgccatagccgatgcggatattatcatcagcatgaatcactttaaagggcacgaacaagccggctttggcggagctttaaagaatttgggcatgggttgtgccagcgtagccggaaaactggaactacattcggcctctcaacccaaaatagatacggaaagttgtatcggctgcaatatctgcgtgaagcactgtgcacacgatgccgtacacctgaatgtaggacgcaaagcagaaatagattacgcgaaatgcgtaggttgcggacagtgtgtcgccttgtgccagtatgacggtgccattatgggcgatgaagatacgtccgaacgcttaaactataagattgccgaatattcactggctgtagtgaaagataagcccaacttccacatcagttttataatgaacgtatctccggaatgtgactgttggaatcataatgatgctgccattgttcccgacctcggtattctggcttctacagacccggtggctctggataaagcatgcgcggatatggtcatccaggctcctatactgcacacgggtaaccgcctttctgccggacatgagcacgatgatttgtgcggccatgacaagtttcacatgatgcacccggatacggactggctggctggattgcgccatgcggaaaagatcggattgggcaatatgcaatatgaattggtgaagatttaaaccttttccgtccgaaagagtcttaatataaatgtactgatacaaaacctgtaaggattgagacaaatcttcaaacaaaatgagcgctcatctcctacttttgtatcttgaagaaatataataataacaaattaaaatctaatcattgaataatggaaacatctgctaaactctactctttgtcgttcagtaacgtgaagacctatttgtttgcattcttatttgttgcaggaaatatagcattgccgcagctttgccatctggttcccatgggcggaccgactttgctgcctatctatttctttacactgattgccgcctataaattcggtttccgtgtaggactgcttacggctttactttctccggtgattaatcatttactgtttggtatgcccgctgccgccgcattgcctgtgttgctgataaaatccggtttgcttgcaggagccgctgcatttgccgcacgatatacaaagaagatatccatagttgcattgcttggtgtgattcttgcttaccaggtgataggcactgcttttgaatgggctatatgtggtaacttcttcctggccgtacaagattttcgtatcggtattccgggtatgctgatccaatggttcggtggttacgctctgttgaaagctatttccaaactttaataatagactatctcccataacaatatggcaaaaacaatggaagaagtgctggaacgcttccgcacaattgaattccacgatgattttgatatgatcgtggctattgctaatggcggtatcgttccggcaggtatcatcaaccagcgattgcaaaaagaagtgcatctgctacgtatcaatttgcgggatgaataccagcatccgaagtacgatgcaccccagttgctcgctccggttgactttgattttaaagataaaagcattttattggtagatgaccgtattaagacaggctctaccattcgtctggcgtgcgaattactgaaagaggcacgtatgataaaaacattcgcagtcaatggtacggcagattatgccttgtttgacgagacgtgttttaagttcccgtggatactataagtaattaataattagcaattaataattcgagaagggcctatggatagaagggatttcttaaagactctggcggtaacgggtgcagtgatgaccgtgcaacgttccgaagcaatggacatactggcgcaaaagctgacaaatgctggcggcggtaaggtggatctggtagctgtgatgggtggagaaccggaagcgatgttcaggcgtgctattacagaaatgggtggcatgaaacagtttataaaaccgggacaaaaggtcgtggttaaaccgaatatcggttgggataaagtacccgaactggccggtaatacaaatccgaagctggttgcggaaattgtgaagcaatgtcttgccgcaggtgccaaggaagttacggtttttgatcatacttgtgatgactggcagaaatgctacaagaacagcggcattgaagaagctgccaaagctgcgggtgccaaggttatgccggctcatctggaaagctactacaaaccagtctcattgcccaaaggcgtacgcatgaaaagtgccaaggtacacgaagctattctgaacagtgatgtatggatcaatgtgcccatcctgaaaaaccatggcggcgccaatctgacgatttccatgaagaaccacatgggtattgtctgggatcgcggtttcttccattccaacgacttgcagcaatgtattgccgatatctgcacaatggataagaaagcagtgctgaatgtggtggatgcctatcgcgttttgaaaacgaacggtccgcgcggacgttctgcttcggatgtggtattgaccaagggattatttatttcacaggatatcgtggccgtagatacggctgccaccaaattctttaaccaggttcgcgaaatgccgcttgaaagcgtagctcaccttgctaacgggcaggcattgaagattggaacaatggatttggataagctgaatgtgaagcgtatcaggctttaattcaagcgatataaagtatacacacttatgttgagaaaagcacgtattatattgtccgttgttatcttcgggctgataaccttttattttctggattttgcggaaatattgccaaatagtttccacagactggcacatatacagtttgtgccggcattgatgtcactcagttttattatcctggcagtgctgatactgattaccttgttattgggacgtatctattgctctacaatttgtccgatgggtatctttcaggatatagtgacctggatttctaaaaaaacggcaaagaaaaagaaacgtttccgctactcgcctgccaggaatatactgcgctggggagtattgggtgtaacggcgatagcttttcttttcggatttacggtcattttaggtctgctcgatccttacagcgctttcggacgtatgacggtcaatgtgtttaaacctgtgtatatgttagggaacaatttgctggaaagcatattttcaagttttaataactatactttctatcaggtggacgcttctcttctgagtatctcgtcctttgttatcggactgttaacgttcttggtgattggctttctggcatggaaatacggacgtatctggtgtaacacaatatgcccggtaggtacgttgcttggctttctgagtcgcttctcactgtttaaagtacgcatcgatacagaaaaatgcaatcattgcggactgtgtgccactaaatgcaaagcctcatgtattaatagtccggagcagactattgattacagtcgttgcgtagattgtttcgattgtctgggtgaatgtcgccagaatgcacttagttataccactcccctcaaaacagagaaacaggtgactgacgcttccaaacgccgttttttacttgccgggctgacaactgccgccgcaactcccaaagtaatggcacaagcccagaatgtagcggctgcggcaaccggaatgaaaagtgataaacgtcagacgcctataacaccgccgggatctatcagtcaggaacattttcaggcacattgcacctcgtgccacctgtgtgtcagcaaatgcccctctcatgtactgaagcctgcttttatggagtatggtttagggggaatgatgcaaccgaccgttttctttgaaaagggtttctgtaattttgattgtaccgtatgcggagatgtttgtccgaatggagctatcctgccactgacgaaagagcagaaacacctgacacagatgggtaaagttgtcttcatcgaggagaactgcatcgtctaccgcgacggaaccagttgtggggcttgttcagaacattgtcctacgcaagctctatcgatgattcctttcaaggacggattgacaattcctcatatagatacggaaatttgtgtagggtgtggcggttgtgaatacgtctgccctgcccgccccttccgcgccgtatatatcgaaggaaatgccgtacagcaagaggctaaacccttcaccgataatcatcaggaagaaattcaggtggatgatttcggcttttgattaaatattttcccgattcccactgacgcctgtcttcgattgtataaattgggggcaggcgttgctttttctctatacttagcatatttttctccctttttactttcaacctacgataaaatcactaatttcgtggcgaacaaatatatggtagattttttacatggaggcaacatcaaataattggtttacgaacaaatatcctataggatatgctttgagcggtggttttatcaagggtttcgcacatctgggcgtgatgcagtcattgttggaacatgacatcaaacctaatatcctttcgggagtaagcgcaggggctttggcaggcgtgttttatgcagacggtaacgaaccgcataaagtgctggattacttctccgggcataaattccaggatctgaccaaattagtcatcccgaaagtgggattgttcgagttaggcgaatttattgatttcctgaaaaccaatctgaaagcaaagacgatggaagaattgcaaatacctctcatcatcactgcaaccgacctcgatcacggacgtgtggtgcatttccacaaagggaatattgccgaacgtgtggcagcttcctgctgtatgcctgtcctcttctctcctgtaaaaatagaaggaacgcattatgtagatggtggggtgtttatgaacttacctgtatctaccatccgacgtgtctgcagcaaagtggtggcagtaaatgttagtccgctactggcgaacaaatataagatgaatattgtaagtattgccatgcgttcctaccacttcatgttccgtgccaatacgttccccgaacgggaaaaagcggatttattaatagaaccgtataacctggatggatacagcaataccgaactggaaaaagcagaagaaatatttatgcagggatacaatgccgctaacgctcttctggatcaattgaaagcggatcagggaaccatctggaaagatgaaagtaattatcaaatcataaaataaaaatagaatggggaaagatgaaaaaatgattatctatcaagtgtttacacgcttgtttggtaacaatcataatcactgcatcaataacggaaacataacggaaaacggatgcggtaaaatggcggactttacagccaaggcactcaatgaaataaagaagttgggagccacccatatttggtataccggcatcatagagcatgccacgcaaacggattatcgccgttacaacatacgtcccgatcatccggctattgttaagggaaaagcaggctctccttatgccatcaaagattattatgacgtggacccggacttggcaaacgatgtacaggaacgtatgaaggaatttgaaaatctggtacaacgtactcatcgtagcggtctgaaagtcattatcgattttgttccgaatcacgttgcccgccaatatcattcggatgcacaacctgacggaacttcacagttgggtgcaaatgatgatcctaattacgctttcagcccatataataatttttactatatccctcaatccgaattgcacggtcagtttgatatgaaaggatcggctgcggaaccttataaagaatgtcctgccaaggctacggggaacaatcgtttcgatgcttatcccaacatcaccgactggtacgaaaccgtgaagctgaattatggagtggactatcagaatggtggaacctgtcacttcaatcccactccggacacctggacaaagatgctggatatccttcttttctgggcagacaagaatatcgacggttttcgttgtgatatggctgaaatggttccggttgaattctgggaatgggtgattccgcaagtgaaagaaaagcatcctgacttgttattcattgcagaggtttataatccggcagaatatcagaattacattttccgcggaaaatttgattatctatatgataaggtaggactttatgatacgcttcgcaatgtgatttgcggctatgattcggctacggccattacccgttcctggcaaagtctgggtggcatcgagaaacgaatgctgaatttcctggagaaccatgacgaacagcgcattgcttctgatttcttcgccggcaatccgcgtaaagccgttccgggactgattgtttcagcttgtatgaataccaatccgatgatgatttatttcgggcaggaattcggtgaactgggcatggatagcgaaggtttcagtggcagagatgggcgtactactatttttgattattggagtgtagataccatacgtcgttggcggaatggtgggaagttcgatggcaagatgctgacggaagaccaaaaacacatctatagtatctaccaacgcatcctgacgctttgcaacaaagaaaaagcaatcactgaaggagaattcttcgatctgatgtatgccaacgcaaatggctggcgcttcaatgagcataaacaatacacattcttgcgcaaagctggaaaagagttattgttcattatcgtgaactttgaccacatttcagtagatgtagctatcaatgtgccttctcatgcctttgatttcctgcaaataccgcagatggatatttatccggcagtagatttgctaaccggaaaaacggaaagtattagtttgctgccttataaggctacggaggtttctgtagagggatacagtggaaagatattgaaaatcaagctataataagaattttaccacggagtaacacagagttccacagagtaatctttattcgaaagaatccttattactctgtggaactctgtgttactccgtggtgctttctccttccagtttttccttcagtctgtacagacgcgtaatggccggattgtaaaactcatccggataatgcgctttgatatcgtttatatttgccactacgtattgtctaagattcacaattttttcggcctcacttagttgtaactctttgggtaactgtgcgttctcagcccacttcatcaaggcattcacactttcctcatcatacttatattccatatgttcgtataatttttctacaaagatataaacaaatgataaaaacacacataccccttcgaactttttctgtggaggcgtgttatattattgtgtttttcatagtattagatataagattaattaaaggagactgtacccgcttgtgataagtaagtacatcaaaaacagaagcgtctgtttgattgataaatgtgtaaggagcatcggtttaccagagccgatgctttttttgtccctgtttgtagcatgttaggaaaattatgcgtaattttgtcagataataaggaaaataccaatatgaacatccctgttatttttcaattcttaaaagaagtgtccgctaacaataaccgcgaatggttcaatgctcacaaggacttgtatgaagaagcccgtggggaatttgagaacctgttatcggctataattacccgtatctcgcttttcgatgaaagtattcgtggcgttcaagtcaaagactgtacttaccggatttatcgtgatacgcgcttttcgcaggacaagaccccgtataaaactcatttgggcggatacatcaacgcccgcggtaagaaatcagaccactgcggttactatgttcacattgaaccgggcaactgtctgttggcaggtggtagctattgcctgcctcctaagacgttgaaagccgtgcgacaggcagtgtatgataacatagacgaatttcgcggtatagttgaaaatccggatttcaagcaatacttcccggtgataggcgaagacttcctgaaaacagctcccaaagggtttccaaaggattttgaatatgtacaatatctgaaatgcaaggaatatacctgttactgcaatcaaccggacagcttctttctggcacccgattgtgtggatcgtacagcggaaatcttcaagcaaatgaaaccttttgctgatttcctgaattacacgattgacgactttgaataaaatttgataataatataactaacttaaaacattaaagctatggtagtagatagattagaaaatttagaaaaatatgcatcgttgaaccccttgttcgcccaagctattgaattcttgcaatcacatgacttgaacgcaatggaagttggcaaaaccgaactgaaaggtaaagacctggttgtaaacgtagctcaaactacccctaaagctaaagaacaagccaaactggaaacacacaatgaatttatagatatccagattcctctctccggtgcggaagtaatgggctataccgcaggaaaagattgcgtaccggctgatgctccctacaatgcagagaaagatattactttcttcgaaggactggctgaaacttatatcactgtaaaacctggaatgtttgctatattcttccctcaagacggacatgctcccggcatttctcccaacggtgtgaagaaagtcattgtgaaagtgaaagcataataatccaatcaatcaaaaactcatcctttatggaaacattgaatttgatcaaaaacgacccctggctggaacctttcgaagatgccatcaaaggccgtcatcagcatgtattagacaaagaggctgaactgacgaacaaagggaaacagactttgtctgattttgcctcgggatatttatatttcggacttcaccgtactgctgacggctggattttccgtgaatgggcacccaacgccacagaaatatttattgtgggcacattcaatgaatggaaagaactaaagaagtacagtctgaaacgtaaggattatggtgtttgggaaatcaaacttccggcagatgccatgagacacggtgatttatacaaactcattgtacattgggaaggcggttgcggagaacgtattcctgcctgggcaacacgggtggtacaagacgagcaaaccaagattttcagtgcgcaggtctggtcaccggaaaagccatataaagtaaagaagcgtacatttaaacctaatacggatcctttgcttatctacgaatgccatatcggtatggcgcaacaggaagataaagtaggaacttacaacgagttccgtgaaaaaactcttccgcgcatagctaaagccggatacaattgcattcaaatcatggctattcaggaacatccctactacggtagtttcggttaccatgtatccagtttctttgccgcttcttcccgtttcggtactccggaagaactgaaggagttgatcgataccgcacacggattgggtattgcagtgattatggacatcgttcattctcatgcagtaaagaatgaagtggaaggcttgggcaattttgccggtgatccgaatcaatacttctaccccggcgcacgacgtgaacatccggcttgggactcactttgtttcgactatggaaaaaatgaagttatccattttcttctttctaattgtaagtactggcttgaggaatacggattcgacggcttccggttcgatggtgtaacatctatgctctattatagtcacggactgggtgaagccttctgtaattatggagactatttcaatggccatcaggatgacaatgccatttgctacctgacacttgccaacaaacttatccacgaagtaaattccaaagcaataacgattgccgaagaagtatcgggaatgcccggtcttgcagctaaagttgaagacggcggctatggtttcgactaccgtatggcgatgaatatccccgattattggatcaagaccatcaaagaaaaaatagacgaagattggaaaccgtccagcatgttctgggaagtaaccaatcgtcgtaaagatgaaaagactatatcttatgcagaaagtcacgaccaggcattagtgggcgataagacgattatcttccgtctgatagatgccgatatgtattggcacatgcagaaaggtgatgaaaactacacagtaaatcgtggtattgctcttcacaagatgatacgtttactgacttcaagtactatcaatggtggttatcttaacttcatgggcaacgaattcggccatcccgaatggattgattttccacgtgaaggtaatggatggtcatgtaagtatgcccgtcgtcagtgggatctggtagataacaagaatcttacttaccactatatggctgactttgatgctgatatgctcaaaaccattaagagcgtgaaagctttccaggcaacacctgttcaggaaatctggcacaatgacggcgatcaggtattggcatatatgcgtaaggattatgtctttgtgttcaatttcaatcccaaacagtcatttaccgattatggcttcctggtttctccgggcacatatgaagtagtattgaatacggataatcctgcttatggcggtaatggattaactgatgacactgtgaaacatttcactattgctgatcctctttatgagaaagagaagaaggaatggttgaagttatatattcctgcccgtacagcagtagtattgaagaaaacgaaataaataacatactataaataagaaagccgtgtcgggaaattccaacacggctttcttattcttcttttcgatagattatttcaattgcgcttcaatttgcggcaatagtttcttaatattatctatcatacttttttcacgaggtttgtctgccgagagtaaggggagtgcacgctccagatacgttttagcattctggaagtttttgtcagcgatttctttctgtgcatcgtacttagctttatctgaattagccaatggtgctgcattcttcagaactaaagctgccttattataagaaagtgtacccaagctgtacaatgcattggtattcttttcatcgtcagcaagtacttgtttgaaagcttcttcagcatcatccagtttattagccttttgtgctttaataccggcgttcagataataattagcatgaagtcttttcaatgtcttgttttccggagctgcttctataccctctttcagagtagcaagatactcactgtcttttttcaaatccttcaatgcaccggctttacctacatatgcatttcccagattatatttcttttgaatagcaatatcaaaatacttgagagcttcttccggttttttgattttatcggcacaaacgccgcagttgtaagcgataacagagtcctgattgtttgtctgtgtcaggtaggtactgaattttgtaaatgcttcctggtaatttttggcttcgagtgctgcctttccttcgttaattagatttccaggttctgtagtttgcgcaaaaaagttagttgctgcacaacacagcgcaatggataacaaaaattttttcatgtgctttaaattttaaaagttgatatcccaaaattagtgttcatagctatagaagcaaaaccattttaacttttttgtagtttttaggacagctgtaacaaatgttattttacgtaaatttcaaggagaactgaatgttaaacactgtcatttcaggctgtactatacaccaccgattaccctttagataaatatttttaaagaattaactcgaaactatctacaatttaattgcttttatccaataaactaaatacctttactgcataaatgaaataggatgtttataaacacctgataggttggtaacaaacaatttattggctgattataagcattcaataagtctgatataatcaactgactacatttattaataaaaaggaattggttatcgcactgtatgaagttaatttatgtaccatcctaatttaatttcaccagtataaaagaatatctaaataaagcaactcatggcattttatgatctgaaaaagaaacccgccctcacaacaaaagagggtgaaaaggaaacactctacccgagcatagtatatagcggcacactctctgcacgcaaattactggaaagggcctcgtatggaaccggctacactgtaggtgaattggagggagcactaagtataattatggatacagctgcacgctacatcggtgaaggataccgtgtagaacttggtgaattcggttactttgccggaaaaattaaggcatcacgcatggtagctaagaaaacagatatccgtgctgcttccattcgtttcaatggggtaagcttcagagcttcaaaacaattcaaaatgaagtcggcaggcgaattagaacgtgtacctgaacgtgcttttcgcacttccagccagttaaatatagaagaactggaaaggcgaatgatgatgcatctggaacaaaatggttttatcacacgatccatctatacaaatttaaccggacgcctgaagtggaaggccacagaggacttgaaaatattcgtggaaaaaggattaatacgaaagatgggcagagggaatcagatgtattatgtgaaggtagaaggcagttgtacaaacaatctaccttgaattgggctatggctcatagccttcataataataagattgagtaatccctttgaatattacttcccgatcatctacctgatcggtgagtgcttgatacagtaaagtacgcagttccaagtcattaatcgggcttcgctccatcgcttgcaaatacagatacttatccacattccgccaatcaacaactcttttaagattcttttttaatatcatatcgagccaaatgcgcatagtccttccatttccctccataaaaggatgggctatgttcatttcaacatattttgcgattatttcatcgaatgtcgtttcgggcattttttctattacaggtaatatgacatcaagatacatgcagttggcaaaacgaaagtttccctttgctatatttagagtacgcacctttccagagaattcatacaaaccgtcaaacaaatagcagtgtatatcgcataatccttttaccgtccctatttcgatacgacttatatcaccagtatcaaacagagcatgggcttttacgaggcttaacttatctatttcgttagtattcatacgcaggtctttgaggtagggaaaaagaaagagagctcaaaacactgtaattatcagtatattagctctcttttcaaagtgattccgttgcgattcgaacgcaagacccacgccttagaagggcgttgctctatccagctgagctacggaaccatccttaattgcggtgcaaaggtacgcttttctgtgaaatttgcaaagattttacgcagaaaatattttgtaaatagatgcttttatatccgattagatgttataatcctaatggtaaaccagttacataccataaaataaataacaaagtccaggctaataatatatatagagagtatctccaggtatatttcagtaatgaaccataggtcgcttgcttatcatattgctgcatgtaagtaaggataagaggcatgtagaacatgaaaggagtgatggcattggtggcactgtcgccaatacgaaaagcgcattgcaccatatccggagaaatccccatattggcaaagaacggaacaaaaatgaaggacatgaaagtccacttggcagtggcagagaccataataaggttcacaagtgctgtaaagagaataaatagaatgagtatccataaactcccaagatggatggacgaaagcatgtccgctcccataatggctatacatttatccaaatgagaatactcgaaacacgcaaacatctgagcagcaaagaaagcgataacaaagtaaacacccaacaatttcataggttgagtaagcccctcaatcacatctccatctgtacgataacgaccggaagcaaagccataaaccatccccataagcccgataccaaaagacagcagaaacagaatgccctctataaaaggagaacggatcagaccaccattcacactacgcaaaataccccatgaagagaaagtagcccaaagaatcacggttgtataaatcaccccgatagatactgcacctatcatagcacgacgctctttgcgagataattgcttataaccattgaaacgaatatgaccggcatattcccccaaagccggaagaagattacgacgggttacctgataaataataaaagccagcaaaaaagtagatgcaaacaagaaatagtaattgcataaaggccctgtatttccaggtgatacatttgccatgtccgcagcttcctgggtagtggcagcaagcataggatccaaagtactcagcatcaagttagcgctatacccacacgaaacagaaacgtatgccgtaataatacctgcaaccggatgcagcccgaccgaatggaataaagttgctgcaatcggtaaaagaattatgtatccggcatcacctactacattggaaagcaatcccaagaaaataaccagtatcaccatgcgccatggattatgcttacgacgtgccccaccgcggatacaagcatctataaaacctgaatgttgtgctaccccgataccaaacatagccacaattaccaagcccagcggagcaaaccccgtgaaattagtaaccacatgccgcaacagccaacgaacaccttccggactaagcaaactttgtacccgtatctcctcccctgtttgcggttgaaacacgctcaggccgtaaatgtcaaatatccatgataagacaatgacagccagcgtcaacaagagaaacattgttgccggatgcggtaaacgccatttgctattcatcatctgcttccagattatctatatcaagaatacggagttccaaagcacgcacaaccagacgggttgcattcactcctacccgctctccttgtggaaacagacggtttaccagatcattctgacgcttttccagagatttaactccaaaaggcatacctttcaggttagcaatcatatctttggtataccccaatgccagatggcgtaggaaacgttcgtcatactcatcgatatcataactgataaccgcttcctgacgtttggcatcattcgcaacagattgcttgaaacggtctacaattttttccagaataggataattaaaaaccagcttctttccatccattactgcctgtacatctgttttcgtaagcagctcacctgttttcaaaataataccgtcagcacccgcattcagaacatccacccaaagcttttcattcagaatttctccggtaaatatgagtacgtgtactcccggataacgcttaaatatattccggcagatatccacaccaatagtagtagaaccacccaaacctaaatccagcaataccaagtcaggaactccggcttctatcaatgtccaaaattcgctttcagtcatggccgtaccgataacttctgcgttgggtatttcatggcggaagatttcttccgttcctttcagttcaagcttgacgtcttctacaataattactttgaatttcttgtcttccatattctttaattttattttcttctcggtatcgtgaaataaactgtaaatccaccattctcagcctgttcagcattgatgcgacagccacgttttccggcaaactcgtcatggtcgcggataatctgcttgcagacgagatactccgtacctcgcaactctcctttttctcctgttgccgtcatacgttccaagtttggatagaaaagttgatttaattcctcacgggttttcgtccttcgcatatcagtgaaaaggaaacgaatatattctccgtctactgctgctgccaaatgtatttccccatccagaggaacagacaaggcttcgtctatcagattctccaataagaagcggagttggataaaatctccgaccactctttcatcgatagctcttgtagagaaggatacagcaaccccttttcccttatttgctttacggaaatacttttctgccagagcaaacaactccggtacggaaatgatcccgcgacggaacgtaacttcttccaactgtcgcgatgcgcacgaactcaagatggtaaatatacctttataatattctatcaattcgctgatagctgaaaccgtctctttttcttccgtttctgagagaatacctgaacggagtttaccaatgagttgcttgatcttattcggataataaattgtctcgtgcttgatggtggaaagacaattatcaagcaccatattctgcacatgcaacataccgtcctcccatgacgcccggtgtgcttcttcatgcgcagcttcgatgtcgcggtattttgttgccagtttcacaactgcattgaagaccacaatcgctatataccgcgcaatcaattccagcaatagatgagccgtctcttgatcgacattctcttgccgttcaagatataacacacccacacagcgcgaatcacccgcagcatccactaccaaaggcaaagcttcaaatcccggtgcggacagttgagtatgctgttcaaaacagcgttgaactacttccttccaaaggtcatcttctgccgtagatgttccattatctcccgcagaggacagctcattttctatagaatttgatgcatattccagttgatgtgtcgtttcattataaacggcgattcccaaccgatcaatacttagcaactcatttacggcatcgaagccttcgtcaacgatacgttgaggaatagctttcagggtatcttcttcccgttgcaatgcctcttctgtttcgggaacttgtatcagggaagcagcaaatatctgtctattgatttccaagacctgttccagattccaacggtttacaagacgtttacgaatatacagaatgtaatatcctaaaagcaacatagctataagtccgataaacaggataacccccaccatcttattattcgtagaacgttccagttgacgacaatattcttccaaagactggtcttcacccaataatttgtacatggtagtataggcggcattattataactgtacgcatcccattgtttcaaagccagaaaagcgacagccgcctcattccggatatccagaatgacatgaaagtccgaattgaaaagatcattccaccaggataactcacccggctccccttctcctctcaatgacatatagcgctgcggctcctgggcataccttttataatgcgcattcaggcaagacatggcagagtctacatattccaaagcctgttcaaaatttccttccacattactataataggcatcattggcatagtcggacgcctcattcaacagagcttcaaactcattttccgcagctaatgacaaagaatcctgagccgtttgcgcatagatttcatccggttgcatcaccgcttcctccactgctttattgcacgaactcatgcctatagaaaagaatatgcacagaaataccatcaaagttttacgcactcctgtaggcaaacggaaataaaaacggctgcccttccctaaagtactttctacattgaacaaacagactctgaatacttcgttcgtcttccggtatttctcaatgatacctttacaattcatcaggccgaagccgctccctttgtttttcagcagttcttcccggtcggcagcatccagtatgcctatttcctgcgaattatacaatttctcaccgacaatacgcgtcacatcttcttcagaaagaccataaccggtatcttctactgagatttccacatattcttctgtcggatttgcatagacttttaccttgcctccctttggagtatatttacgggcattttctgcaagcgtgtttatcataaacaacgtcaacgccttgtcagctttcacataggtatccgttggtgtcacttccagttgttgctgtttcatctcgaaagcacggcttcctttccgtatcagatcgaaaagctcgttcaacccgaatgtttctatattcaagctcaggctaccctgtttcattttaatccataaagcaaggatatcattgtattcattgatggttgtcaccaattcgtccatatattgatacttctcggctttgatgtgttcgtcatggataaaacccttttccgtcagtttatgcacttcattaataatacggtctatgtacggatgaataccgttcacaatggccatacacgctttctttataagattctgacgtttatttccggctatatgctgttcgtacacataccgttctttctccaaccgacggcgttcgtcacccagcgaaatggaagtcatgccattatcaagcgcccatgtaatataaggagcaatcacatgtagtattgccttctcatccttcgtaagacgtttgggtaataccaactgcccatcttctatcctgatgtcttttacactgaaaagttcctctatatctgtctgcacagcagaaagaatggcatctacaatctcttcttccgtctgcgcatccgtgggaatagaagcggttattttctggcaaatgtccaacatctgcctcaaacggtgcaaatggacatgattacgttctttagaccgtttattgaatatccaaaaaaataaaaccaccagtataaaaccgacaatcacgaagaagagtaaaatattaagctgtcgggcttcactttccaaagcctgataacggctttccaactccttatcctggcgggtatcttccagaatatccagataaatattgcgattataatcggagtgttgcttcatttccagtccggcatacgtaacactcagttgttcgcgaatacgtgaaatccattccggaacggttcttaacttacgctctatccatgctttttctgaagaaatggtatcccgtatatcataggttttcaaccagtccaggctatcgtggcaatcataaaaacggcgatgatgactgttcacgcactccaaggcaagcgtcaatgtatccaacgcttcggcgtagttatcatgcgcattcagatatttaccaatagaaacataggcaccggcaatctgatacacatcattatattgcttgaatttcttcaaagccaattgtcctaaacgcatgggcaacagagaatccacgggaacatcaaactgtttcaatgcatgagaacgcctgacctggaaaaagtcataattatcaggagatgccatcaggttagcaagcccctgcaccccattaccttcaaaatacaagtatcctccgcgggatgccattttccaagttgtatacaactcatcgaattcacgcaaacgacgttcatccgccgtttcaccatcacaaagtgctgccgatccttttatataatgataatacagtaactggttcgtatccgctacaagttcttcctgcggatatatttcgttgatggaagccaccgcttccggacgttgttgcagatagtagtaataaactgcggaaacgatataaaattcggagcgtgcatagttcagtctcaaccgttcgtgcttatctacgaaaagcttgttatcttcatctattcgtttcatgcggcggagggcactgttccgatagtcataaaattctttgttcatggccgtccgctgatagattttcatcaatccgatatcggcaaccagcaattccagttcatttttcgtgagactatacacatctttatgaaacttctccgctttctcaaaatccatgcgcataaaagcacaaaaacccagattattggatgcttccgctttcccttgactatacagatttacttttccataagcttgcgtggcagcatgacaagaagagtccaggtctttataccgataagaataagccacttggttgagcgaatcgataagatgtacttccttggtgggagcagtacccacacaagaaatcattactatgcaaaaacacagtaagcccaccaatcgtatatgaggaaaccgtttcacttagcaaagctacaaataaatccgggaaagaaaaaagatttttctacaataagtcttgtagaatgtagcgggaaattcataactttgcagccgtattaaacaaataggtaacatctattacaaaatgagcgaaaaagcacccgtaatggtattctccggaactaactcgagataccttgcagagaaaatctgcgcaagccttgattgccctctgggaaagatgaacatcacccactttgctgatggtgagtttgctgtttcctatgaagagtcaattcgtggcgcacatgtattcctggttcaatccaccttccctaattccgacaatttaatggaacttctgctgatgatcgacgcagctaaaagagcgtctgctaaaagcgttgttgcagtcattccatatttcggttgggcacgacaggacagaaaagacaaacctcgcgtttctatcggcgcaaagttagtagccgatttactttcagtagcaggtatcgatcgtttgattacgatggatctccatgctgatcaaatccaaggtttcttcaacattccggtagatcacttgtatgcttcggcagtgttcctcccctatattgagtccttgaaattgaaagatcttgtaatcgctacgccggatgtgggtggttccaaacgtgccagcacattctcaaagtatttgggagttcccctggtattgtgcaacaaatcacgtgagaaagcaaacgaagttgcatccatgcagattatcggtgatgtaaccgataagaatgtagtattggtagatgacattgtagatacagccggtactatcaccaaagcagctaacattatgttggatgccggtgctaaatcagtacgcgctattgcaagccactgtgtaatgtctgacccggcgtctttccgtgtacaggaatccagtctgaccgaaatcgtatttaccgatagtatcccctactctaagaaatgcgcgaaagtgaaacaactcagtattgctgatatgtttgcagaaaccattaagagagtggtgaataatgagtctatcagttcacaatacattatctaaattgccaaaggtaatttagaaattaaaaattaataattaaaaattaaaggctgcgcgatgttacaactgcgcagcctttaatttttaattattaatttttaatttaattccagtcttcccattttgtacgtgcccttttttattacttttccgtttttatccgtttcaacaaaaggaccgtgttttttgccttgcttgaagaagccttcgtaacgattaccgtttttatcctcttgtataccgttaccttcttccataccattcacaaaaccacctttatatttagttccgtctgtcataatcagggttccctgaccattgaactggttgtttttccattcgccttcgtaggaatcacctacattccatttatacgttccgcggccgtcacgttggttatctttccagtcgccgtcatagactgcaccatttgcccaggtgaatacaccttttccatgttgcatgccgtctttgaagtttcctacatatttattgccgttggcgtgataataaatgccggctccggtgcgttcaccctgcacatacgcaccttcatagcgatcgccggtgtggaagaagtaaatacctttgccatgttgcatatcatctttccagtcgcctacatatttatctccgttggcatattcgaaagttccttttccatcacgcacatcgttcttccagtcaccttcatatttacagccgtcattccagacaaaagtacctttaccctctttcttatcattcttccaggaaccttcatatttggaaccatttttccaggtatatgtgccttgaccttcacgcttgtcatttacccagtctccttcgtaaatgtcaccggtataataatacatcgtacctttgccttgctggtaatcctgaaaccacataccgtcataacggttgttgttcatgaaatagtagatacccttaccgtgttgctggtcctgaaaccattgtccttcgtacttttcgccgtcaggaaatgtataagtaccatatccttcacgttttcctttcacatattcaccttcgtagacattgccattcttgaaaaccgtcttaccctttccgttgggtttacgtcctttcatttcacccgtatatacggagccatctttaaaggtatgagttcctatctttatttcagaagagaaagttgtttttactttgtcgaagaaaccagatttcttttcctgggccgtcaccccgccttgggacatgaataccagaatgagtgcagtatatagatatttcattgaaaattataaattagcgattttaataataagacgtgtaaacgcagcaacttgttacacgtctcatatagtatttgcacaaagatacaattaatctgctaaaaggaaggggtatcacaccttttttatgacatttttttgccggatacgatttcttttaatgtctctttgcacaaatagcgtgaggcaagttcgcgtatctcgacaggagtaattgtcttcactgcttctacggcatccctcacatacgagtccgggaggccggaagtatgaataaagatccaggcatccgccagtgagaaagcagattcatagctgcggcacatatcacccaacatatagttcctcaccatggcaagttcttcggcaggtacgaggtcattttgcaggcggtctatttcatggtaaacttcttttataagcggttctacaaattcattggcagtctctgcattgacaaccaacagcccactatcgggataaggcatgataccggcagatataccatacgtatatcctttatcttcacgaatattagacatcaaacggctaccaaaatagcctccgaataaggtaaccagaacacgaactttcaaatagtcaggatggcgacggtctaaagaaagcatccccatacgaacagcactttgcattgcatcggcacgttcggtaaagatacgtttctcagaagaagtcaccggagtataggagtttttttccggtttccggaaatctttgccgaaaggttcacttccaaaaagagtttcaatacgactgataatgtcttcgctgaccttccccgcaagatagatactgcaatttccggaatgataatatcggtcgtaaaacgattgcaggacagaagggttgatcaaatgataatcttccttctgcactaattgcccgcacggatgcgtatcgccatatacggcatttatcaaagtgcgatgggccagaaagtccaccttggagctgttcacaagaaattgctggatattgctgtcgataatcactcccagttctttttcagggaaaagaggttcttttacgatagattcaaaaatatctaaagtttccggcagatatttattcaaagaataaagggtgatataagcatactcggacgagctggaaagctccaaccaggcaccatagtaatccaacttttcggcaatggccgcggccgaataacgccgggtaccttcgcgcagcatccggttggtaaacaaagcctgcaagcgttggctctgttgccagcgtccaccttctatcaacaggtcaattcggactacttcattatccccggcattgagtatatataaaggtatgccatttttcatcacccggcattcgggagatggcactgccagttgttccggctcacaaataaggggctggatagttctgtctaacatattttcaagaattcttcagccttttccaaatcctggggagtatcaatgccaatggtctctacttcggtaataccggctttaatggtataaccattctccagccaacgaagttgttccagcgattctgccagttccaacgaagattgcggcaacgaagtaatctcttttaaaacttcagcacgataagcgtataatcctatatgcttataataagtgtgatttttcaaccaatcttgtttttccgcatttcgctgataaggaataatggagcggctgaaatagagtgcattcatattcttattcagcactactttcggagaattgatattctccaaagcttcaaacccattctcaggagtaaaaggtttcaccagtgtagcaatctgggtcgtaatatcgttgaagcaagcttttacagtttccagttgggagggttgaataaaaggttcgtcaccctgaatattgactacgacatcaaagtctccccctattttagtatatgcttcatagcaacgatccgtaccgcttttatgattaacggaagtcatcactactttacctccgaaagcttttacagcttcttcgatccgttcgtcatctgtggccacataagcatcgtccagaatacctgccacttgttcatatactcgctgtattacagttttacctcccagcatcgccaacggttttgcaggaaaacgcgtggatgcgtaacgggcgggaatgattcctaaaaacttcaacatatttatatttactattttatagatccgcgttcgcccgctttatccgcgtcgtccgcgtacccattttaaattactctatttctttcaatccccggcaaatatagtccctttttaaatcatcgggtttatagactgtgtcatcacatgataataagtccagatccaaccggactatttcttgctttttctcttcaggcatccgccccgcttcccgttcaatagctttcaaacaagaagttatttccgccgcatcgctactggaaataaaacgtgccacctgattggaaaataaggatgaacgccggaaataaagcggtttagtctcttcttccgtagaaaaacgaataccaggaaacagttctttcaaccgcttccgcgccaacgaaagattctctttctgttgctcgttactaccgatgctgattgtataaaccactttcgaaatcaagaatttagaccgacacttgaactttaatcaaagaagtcatccaaaccagtttctgatgccgattcaaaattaacgtccccattatccttacaaggatcgaaaccttccggaagttggaatgtctcattttcatcatatcccagtgtcttgtctccaagcacttttaccatatatttagaccagataggcaatgccatagaagcaccttgcccatgcagcatagtatcgaaatgaatatcgcgctcttctccaccaacccagcatccggataccagtgaaggagtaaagcccataaaccaaccatctgcattatagttagttgttccggtcttaccacccatatcagctttcacacctaagcgacgaacacgtccacctgttccctcattaataacggcacgaagcataaccaacatcttataagcgctggaaacactgataacctcttccatttccggagagaacgtagctaatacatttccgtcattatcttcaatgcgagttacaaacagtggagctacacggatacctttattggggaatgcagtataagcactgaccatttctcctaccgaaatttcgcaaggaccaagacataaagaaactgacggcacaatttcacgattacgtacgccaaaactttcaatcaagcgtttcagagaatatgggttgagcttactcatcagatacgctgtgatccagttgtcagagttagccaatccccacttcacagttaccatttctccataacgtttagtattggcattacggggcgtccacggtttgccgttttcatcaattaaagtatattccacatgacgcgcttcatcacaaggagaatagccattctccatagctaatgtgtagacataaggcttaatggtggaccccacctgacggcgacctaccattgccatatcatatttaaaataatgatgattaggccctccgacatatgctttcacatgcccattatgcggattcatagacataaaacctgcacggaggaagtgtttgtaatagcggatagaatccataggtgtcatgattgtatccttttcaccattccaggtaaataccgacatttcttcaggtgtattgaaagctttttcaatttgggcatccgatgccccggctttcttcatgatacgataacggtcggactgtttcatagtgcgggtaagaatttcatctacctgctcctgcgtaattctgttactgtaaggcgcttttttacgtcctttcttttctttgaagaaatagccttgcaattctttcaggtgctcttctaccgcctcttctgcatattgctgcatacgggagtcaatagtggtataaattttcagaccgtctgtataaagattatatttagagccatctttcttagtattcttttcacaccaaccaaataaaggattattttcccagtcaagagaatcttcatagaatttttgcatctgccaaccacgataatctccctttacaggtttctttgcattcaatacaccacgcagatattcgcggaagtaagttgccattccttcattatgatcaacgcgagtatatttcagaacaagcggaagggcctgcaaagaatcacattcttccgctgtgatatatccggctttacgcatttgatcaagcaccacgttacgacgcccgcgtgaacgttcattatatcgtacaggattaaaataagatggattcttgcacattcctacaagcatagcggcttcttctatctttaaatcatttggatcgcaaccgaaataagtattggcagcagttttaatacctactgcattgttcaagaaatcaaatttattaagatacatggtaagtatctcttctttagtgtaataacgttccaatttcacggcaatcacccactcgatgggtttctgaaacaaacgttccattacattatccgcactgggcgaataaagctgtttggataattgttgtgtaatcgtactacctccacctgcattcgtctgaaataacaaaccacgcttcacgatagcgcggaacaatgcgatggcatcaattccggagtgtttggcaaaacgcacatcttccgttgcaatcaaagcattgataatattaggagacagatcattatagcctacatacacacgattctctttactaaaagaataagttccgagcaccttcccgtcttctgagaaaatttgtgtagcaaacttataattggggttttccagatcttcgacaggaggcatatagcctatccaaccttttgcaatggagaagaaaacagtgacgcaagccaatactatgacggctaagaatatccaaaggatttttatgatgttctttatcatgtttattactgtaaattcactaaatcaataaaatagattacctgtaaaaataacaaggcaaaggtacggaattatattggaacacccttataaattctatagaaaactcttaaaacgccacactttatcatcggaaatgccacatcttaatgggtaaaatgccacacttcagcaagcacaaagtgtggcatttcggagaatgaaatgtagcatttccgatgataaagtgtggcgtttggggggatgaaacctggcattttggaggcgttttttgtttaggaaacggccgattccaagctgttttttgcaaaaaaacgcatttttttgcttaggaacaaagtgtgatcaagaagggcaaaatgctattattcaacactttcactaaaacagacaatgcatttttctttcttatatattctttatataacaacaacagcagaaaagaaaaagaaaagctactgctgatgctggtaatgatccaaacaaattccggcattcatctcaccgcataagaaacttcatcccgtaagattgttttttcgccccacgagatattttttttcagctcatagggcaaaactctttgtcccataaactgaagatcaccggctatggagacgaaaaaaaacttctaaattttctcccgtctttcttccgtactccgcatcttttccgtacctttgaactctcgaaaagaattaaaataacgaacgatatggaaaacagaagtttagtcaccattgccgagcatagcaaggaaaaaatcctctacatgatcgagatggcgaagcagtttgaagcccgtcccaaccgtaggctgctggaagggaaagtggttgccaccctctttttcgagccgtctacccgtacaagactcagttttgaaacagcagccaaccgcttgggagcccgtgtaatcgggtttagtgaccccaaagcaacgagttcttcgaaaggcgaaaccctgaaagataccatcaaaatggtgagcaactacgccgatatcatcgtgatgcggcatcatctggaaggagccgcccgctatgccagcgaagtaaccacagtgcctatcgtcaatgccggagacggagccaaccagcatccttcacaaacgatgctcgacctctactccatctacaaaacccaggatacactggagaacttgaatattttcctcgttggtgacctcaaatatggccgcaccgtacactcactgctgatggcaatgcgccacttcaacccgactttccacttcatagctcctgatgaattgagaatgcccgaagaatacaaaatttactgccgtgatcatggcattaaatacgtggaacatacggactttacggaagaaaccatagcagatgccgacatcctctacatgacccgtgtgcagcgtgaacgcttcactgacctcatggagtacgaacgggtgaagaacgtttacatcctgcgcaacaagatgctggaacatactcgtcccaatttatgcattctgcatcccctgccccgcgtcaatgaaatcgcttatgacgtagacgataatccgaaagcttactacttccagcaagctcaaaacggtctgtatgctcgtgaggctatcctctgcgatgtattaggcattacactggatgaggtgaaagcctaaattgtactttgtaaattgctaaattgtaaattgaaagatgagcgaaaaaaaacaagaattacaggttgccgcattagaaaacggtacagttatcgaccatatcccttctgaaaatctgttcacagtagtctctttgctgggacttgaacacatgaataacaatatcaccattggctttaatctcaaaagcggaaagctgggtactaaaggcattattaaaattgcggataaatttttctgcgatgacgaaattaatcgtatcgccgtggtagcacctaatgtgaagctgaatattatccgggattatgaagtggtggaaaaacgtgaagttagccttcctgaagaacttcgcggcattgtaaagtgtgctaatcccaaatgtattacgaacaacgagcccatggcgacgttattccatgtagtggataaggagaattgtgtgatccgatgccattattgcgagaaagaacaaaacaggaacgaaattgaaataatataagagctcgtaactctttagtcatgaaacaagactggaagcccggaacaatgatttacccgcttcctgccgtattggtaagctgcggaagcattccggaagaatataacatattaacaattgcatggacgggaacgatttgtacgaacccgcccatgtgctatatttcagtacgtcccgaacgccactcctacgaaatcctgaaacggaatatggagtttgtcatcaatctcactaccaaagatatggcgcgtgcaacggattggtgtggcgtacgttccgggaaagactacaataagtttgaagaaatgcatctgacaccgggaaaaagcactgtggtcaatgcccctcttattgaagaatcccctttgtgtatagaatgtcgtgtaaaggaaatcatgtcactcggctcgcatgatatgtttattgccgatgtggtaaacgtgcgtgccgacgaccggaacctgaacctggaaaccgggaaactggagctggcggaagctaatccactggtttatgtacatggaggatactatgaattgggtgaaaagatcggtaaatttggctggtctgttgagaagaaaagatagtgattaacggttagtggtaagtgatgaacaaagttttgaaaatatttatcctgtgccttttgtttttccccgctacaacgtgggggcaatctcatcttgtgcccggtacagcggttgaagaaccactgaagaaacatcaccatgatcgtccggtgaacttcggtattaaaggtggtttcacctcttccctcttccttgtatctaatcttacattaaacggaatcaccatagacgaggtgcagaataactacaagataggctatttcggctctgtctttatgcgtatcaactttgaacgtcatttcctgcaaccggaaatatcctacaatatcaaccgctgcaatattactttcgaaaaacctgccgcagaggatgctcctttggaaatggcatctataacttctgaaatccacagtgtagacattcctgtgatctacggatataatgttattaaggaggggccctatagtctggctgtattcggcggtcctaaatttcgttatatctggaataaaaagagcgaagttacttttgagaatttcgaccagcagggaatcaaagaaaggctgcgtccgctgaacctcagcttcacccttggagtagccgtcactatctcccgcattttcttcgatttccgctatgacataggagtacataatatatcccgcaaagtgacttatgatgacggcgtcgtcgaaggtgatccacccgctgacgaaatacgtttccaccgacgagacaatgttctcagcttttcctttggagtattcttttagaaagtaaatttctgtcttttctgacagtttattcatttttttaccgtaaatttgtgcgcttaataagagaacacagatttatcaaacttatctaagtaagcaaaatgaaaagagacgatttaattttcgatatcatcgaaaaagaacatcaacgtcagctcaaaggtattgaactgattgcatcagagaattttgtaagtgaccaagtaatggaggcaatgggctcctgtctcactaacaagtatgcagaaggttatcccggcaaacgttactacggaggttgcgaagtagtagaccagagcgaacaaattgctatcgaccgcataaaggaaatctttggtgcagaatgggctaacgtgcaaccccactcaggcgcacaagctaatgcagctgtattcctcgctgtattgaatccgggtgacaaattcatgggattgaatctggctcacggcggtcacctctcacacggttctttagtaaatacttccggtatcatctatactccctgtgaatataatctgaataaggaaaccggtcgcgtagactatgatcagatggaagaagttgctttgcgcgaaaagcccaaaatgatcatcggtggtggttcagcatattcccgcgaatgggactacaagcgtatgcgcgaaatcgcagacaaagtaggtgctatcctgatgatcgatatggctcaccctgccggactgattgcagccggattgctggaaaatcctgtgaagtatgctcatatcgttacttctaccacacataagactttgcgtggtcctcgcggaggtatcatcctgattggcaaagacttccctaatccttggggcaaaacgacaccgaagggtgaaatcaagatgatgtctcagttgatcgactcagctgtattcccgggtatccaaggtggtccgttggaacacgtcattgcatcaaaagctgttgcattcggtgaaatcctgcaacccgaattcaaagaatatgctgctcaagtgaagaaaaatgcggccgtactggcacaagcattaatcgaccgtggctttacaatcgtttccggtggtacagataatcactctatgctggtcgacctgcgtagcaaatatcctgatctcacaggtaaagttgctgaaaaagcattggtatctgccgatatcactgtaaacaagaatatggttccgttcgatagccgttctgcattccagacttccggtatccgtttgggtactcctgccatcactactcgtggcgccaaagaagatctgatgctggaaattgcagaaatgattgaaacggttctgtccaatgtagaaaacgaagcggttattgccgaagttcgcgcacgcgtaaataagacaatggagaaatatccgctgttcgcatattaagaaatttgtttttacgagtcagccggttttgttttttccggccgacaggtatatacatttttgagaaaaaatgtatgtatataaatgattaaatatatagttaaattgtaaaatggtccgtagcctttgtgataaaggctacggacctcttttttttacgcattgacactatttttgttgtattgaaaggatactcctgcttgcatttccttatttttggaaactacatttattattcactttaaaactttaattactatgtcagaaaacattggagtagctacaggtaagattatgctgaaaattgttatcgctctttttaaaggtgtatggaatgtactgaccttcgggtttagagcttacaaaggtcaccgggacaaaaaagacgccgaaatgcgtgaacagttaagacaggtacaagcaaacaacaattcccaaactatttaattctgcaatactatgagctcagcaaacaagaaacacatgcagggtggtatgaacaccacatacagcaatgtaaatactgaagacgaaagaaacaaaaaagcggaagaactattgttccaggcatgggaaacagccggatatcatggacagccggatgaagattattatcctcgaacagcccaggaaacaagggatatggaagatctgctgacacaagcggaagcagccattgatgacccgtcggataccgaactaatggaggtaatggctgatacgcgcgaagtgctggaatggtccaaacagcggcattggacattcgcatggtggatcatcatctgtgtagccattatgggatgttattatttctatcaggccggaagcgaacaggattatgtagcaaagagacaggcgctgactgatgagcaagtgcagactgaacttagcgaagccatcacccggcaacaaagttacattgatacttatagccaaaagttggcagtagataccatttctgaagaaacacgcagtctttatgaaaaatatatggaaaatgccactgaagaaataaaagaactgaaagcatataatgtggaaacttataaaaagcacttggtagatcgtgccgatgccggagtatggcgtgaaagatgggaagcgatctggtgttttatctggatcgtgctttatattttcgcctgccgtccacgtggatatatgattactaaacgtcgccgtgaagacaaaatggctaccggtctcaaaaagatattattcggcattgcaggagctttagtgggtgctgccggcgctttatatgtgaccaccaccataactaaatggagcgatggaagtaaaacccgtgatgatgatagcatgattatctatgccatgaagttcggtcttattgcactggctgttatcatcgttctttgggcagcacgtattgttatcgtgattgctacacttctaggactattgagaaactacgactggaaacagttggccaaagacccgaaagccatgttgaatgatttgaaataaatggaaaggggatgcaagtatataccggcatcccctatttctatatttatttccgatggttagctcaatccttctatatttccatctacaatgtcgatgtgcatagcttgcggctctttgggaagccccggcatgcgcagaatttctccggcgatggcaacaatcatttccgcaccgttattgattacaatatccttgatatgaaattcaaagttgttcaccgcaccgtatattttcggatcggcagagaaagaatattgtgttttggcaatgcaaacgggataatgaccaatgcccatcttctctatcaatttgatgattttacgtgaatggatactgtaagtcaccacactggcaccgtaaagattgcaagctatcttctctatcttttgttctacactgtcattttcactataactgaagttcaagggttcagaaggtttcttctcaatagtatccactaccagattagcgagctccacagccccctctcctccttctgcaaaggcattattgacagcgaaccctacacctaacttctcttcgcaatgccggcggattgcttctacctcctcgtccgtatcactggcaaaacgattgaaggcaaccagcaccgtctgaccgaatgaacgtagattgcgtatatgtttatcgagattaccgaagccttgttgcaatccttccatattgggttctttaatacgatccagactgacaccgccatgcatcttcaagccttgtgcagtagccacaatcactgtcagtttaggttgcaacccacttttgcgacatttgatattataaaatttctccgcaccaagatcggcaccgaaaccagcttccgttacaacataatctccaaaagtcattgccattttcgttgcaagaatagagttacaaccatgcgcaatatttgcgaagggaccgccatgaacaaaagctgccgatccttcggttgtctgaaccaagttcggattgatagcatctttcagcaagacagtgatggctcctgctactcctaactccttcacagtgaacgggcaaccatcaaaacggaaaccaaggatgatattctcgatccgtcgtttcaggtcgtctatgtcctttgccagacagagaatagccataatttcggatgcaggggtaatatcgaaaccggattcttcggtaataccgttcgtactggggcctaaaccggtgacaatgctacgcaaagagcggtcgttcacatcgagcacgcgctgccagatgatttctttcagcccgaatccgtccgcctgatgctgataaagataattatcgagcaatgcggatatcatattgtgcgccgaagtgatggcatgaaaatctcctgtaaagtgcagatttatcttttccataggaagcacctgggcataaccgccacctgccgctccacccttcatgccgaaacaaggtcctaacgaaggttcacgcaaagcaacgatggctttcttgccgatcttattcaaccccaatgccagaccgatggaaaccgtagtcttaccaatacctgctttggtagcagtaatggcagttaccaaaatcaggttacttttcttcactttttcttcatcaatcagatgtgtagggattttagcaatataccgtccgtagttttctacttcttcacgtggaatacctacattctcggctacctgcttaatcttcttcagctctatgctgcgggctatttcaatgtctgatttcatacagagaacttctttaaataaaactttctttttgaaagctacaaaagtacgaaaaagagtgcagatagcaagattttagggaaagaaagcctctgttatcttattcaagtgtcaaagcgataccttctacacgatccgagtttgaaccttccggctcaaccatatcgaaagaacgtgttccggcaggcagtggagcgaaataaagagtataatcggcctctccactttccggcatatagaatttctcccctaaaggaataccttccgaacgaagaaccggacatacagttccattgtccgctactaactggatattcttcataatttgtatccaatatttgggtatataataggcacgaatccgcaagaccgtagcagtatccgtcaatactacctggcggatttcaggaatatcgttattgcttttcttcaccgtcgggaaattcaccactttatgtccattctcttcccctaaactcatcacatattcgtctacattcagtaggcggcgaagttttcgtttcaagctgtgtgcactatatccgaaccatttttctacaatgcgtccttcaggtgaaataaggacataatttggaattccacgtactccatatttggcaaataatccattacttcctttcaattcattcagattctgccaagtcatttcatgcgttttagaggcagtttcccaacctttcttggtatcgatgctcagacttactattgtcaggcgatctttgtacatctcagccacttccttcatttcgggtagagccataaggcacggaccgcaaccacgactccagaaatccaacatgatatatttacctttaaaatcagccaggcggtgtacatttccctccaagtcgtacaaatcagcatctgccatttcatcacccacttccactacttggggaggaaagagatatgtatatgtattcattgccaaatcggtctgtttttcttcatcggtcagcctttcataaagagcaatcacttcttctttataaggataattttcagtatactttgctgacattgccaacttctccaattgctccagccaaatatcgtcaacaggaatctgcttcatacgttttatagtgttggcatcaatacggatcgtaatttcatcttccagcttccgtaaactatcagcttgtgcacgtatcgcctgtctttcttcgtccaccgcacttcctacatacttccggcgatatgcacgctgcaacaaagaattgcgctgatattcattccacaattcgcgtgagtcgtttataaaagcctgattagccacttgttccggaacagtgcttttcacatcccaagttcgtatcagtgtattttcaccgcttatccgtatattatctcccggacgcacccaaagccttaaactcatggaaggaaacttgtcacttcttcccatcatatccactatttctgtttcgttccccaatgtttctgcctgaaaacgaaaatgtccgttacgaatcgtatcaacaccgatactgctacccacatttccatctaaacgaaacaaagtgattaaagctccgtcttctacattctttacttgcccttctattgtaaaagtcccttgagcttgtgccgcccaaacacttgtcattaagaacagcgttacaatctcttttttcatatacgtgctgtttagttataaaattatatatctacgcacaaaactatatgatttctccgagatcagcaaataaaattacgattatttcgtaattacctgttttctttaatattaagcatctatcaccgagtatttttactttcagtcaatatatatccgtccatcatccgtatgattctttctgcttcacgggcgttctcttcggagtgcgttaccataacaacagtagctccatcatgattcagctctttcaggagattcatcacttcattaccattcgtagaatccagatttcccgtaggttcatcggcaaggataatgcgggggttggtaacaatggcacgcgctatagccacacgttgctgctgtccaccggaaagttgttgcggataatgctcggtgcggtgagctatctgcatgcgctccaaagcctcattgacacgcttcacacgttcacgggtagaaactccggcatagagcaaaggaagttccacgttttcaaagactgtaagctcgtctatcaggttgaaactctgaaatacaaaaccaagatttccgttacgcaggtctgtacggtcgttttcagaatagcgggaaacttcctgatccataaaccaaagctcgccggaagtggggttatcaagcaaacctatcatattcagcaaagtagatttaccgcaaccggaaggtcccataatggcaacaaactctccctgactgatttctaaacttacttcattcaatgcagtggtctgtacgctttccgtacggaatattttggtgaggttaattatcttaatcataatcgtatattgtattgttattatcttaaacatttatttattcatatctcaaggacactaccggattttgcgaagccttccgccaggtttgcccaatgaccgtaagcaaagtaacccctgtaatgactgctcctgccaatatgaacaaccaccaacttatggcagtctgataagcaaattcgctcagccaacggtacataaggtaatatccaatgggagatgccacaacaaaagcaattcccacccatttcagatattccatacagaacatctttacaatccggttggaatgggcaccgttcactttacgcacaccgatttcttttgtccgctgttccgtggagagggtaaccagtccaaatacacccagcatagctataacgatggccaatacagtgaagaatagcaacatccggctttgttgatgttccttggtatagttcttattcaatgcatcagaaaagaactgataactgaaatcctttacgaacaaatcatcctgtacagccatctcttcgtattttctctgaatgaatttcagagtctcctgccgatgttcgggagctatctttatatgcatatacgataatgcttccggagaataataaagaatagcaggctttatcttctcgcgcagagactggaaattgaaatctttcaccactcctacaatatgcatcttgccccaggtactcatttgtaactccataccgataggatcagctaccttcatacccttccaggcagcctcattaattacaataccgggattcctgtctccccagtattttccaaaatcagattccagcaatttcccttttatcaactccaaaccaaatgtcttactaaaatccccatcggcaaatactattaccatttttagtgaatcttcctgcccgtctatatttgtccaacggaataggctaccgtctccatgggcttcaccttctccaaggctctcgataggtgctcccatagatatacttttcacatttggatttctcagtaattcttgcttgaatccagccacattataccacaaactggtatagacggataccacattttccttgtcaagtcccaaatctttgttttgcatatagtggagctgtttaaagacgatagcagtcagcaacatcagcgtaagagctataaaaaactgtatgcacaccaatcctttgataagtcctcctttctttcctgttttctgtccacctttaaaagcaagtaatggattgatggaagaaagataaaaagccggataacttcctgccagacagcctattcccactatgccgaacaatatataaaagaagacagcccaactcagccgcagtgagatttccgtatccatgaacttattgaataacggcaacatcaattctgtcaaagctaaagccaatatcagagatataaatgcctgtaccagactttccgaaagaaactgtgagatcagagtctttcgcttggcgcctgttattttgcgtacgcctatttctttataacgcatggaagcccgtgccgtagaaagtgttgtaaagttgaaggcgcccataaagataactaatatagccagagctgtaaacagataaatagtggccatgttaccatgattctttacgcaaggatcgggaaaagtagtatgcagatgaatatctttgactgattgaaaacgcaacaaagttcgcttttccccaaacttactaagcgcccgactcatgcttttcaattcctgctgatacatttttccttcgtcaccagccttcatctttacatatacatggatactctcacgaaaatgatcccaattatgacccatcatccccatgccataagcctccatcggataaacaatatcaaaccggatatggctctttgaaggtattttcaccactgcaactacattatagattctttctcttccatatccgctataggttaatttctgtcctactgccagtctcttaccaaacattttccgtgccgtcgattccgacaaaacgacattatcaggattattacttatatactccggatttccttccaacaccggaaaaggaaatattcgaaagaatacagaatcaacatatagcccatgtccgctgatctttttatgactttccgtctcaaatgtatgcaactctccatacttaatagctgtagcttcctctacttgtggaaagtcttcacgaaagactttagtaagcgaacgtaccgtcgaaggagactcttttatttccccactcggctcccgcttcacctcgatagtccggtaaacgcgattcacctcgggaaagcagtcatcatacgtcagttcgtccaccacccaaaggtagatgaggaacgctgccgccatgccgaatacaaaacccaacatattgatggaagaaaacaagaaactccgctttataagccgaagcgcaactttcacataatgctttatcatctgttattctcctattttttattattctatggttagcactatcaactcatcatccggcacgtcctgccctttcaaagcatccggatatttgtctttcatattcattgcatcgagacaggtgaaaagtatatttcctactgctcctttgggatagaacgacacattttgctcgccatcggctgggaaacacggaaaatcgagttctaccttatcagcttcatgaggcagggaaaagaagtttccggatgttttatcatatatcagcgaataaagagaaaccgatttcgcttttcgtgcgttaggcgaatcgtatcctttcgtaagcctgataaacagatagcgatccgtctccaaccactgatctacaaaataaaaatcatccacattactgccacctatgaccttctgtccaacggcacgctgcaaagagccgaaatccaatcgataaatagccttcagcgtggaagcgttttctaattggtaaagcgtattatcataagccaggcgtatccgcgttttgccttgataatcataaatattccatggttctccgctccgtaccgaaccggatcttcccgaaggggcatagtcaggcaaatgggtaggatcgaaatagcacaaggtatctccttttagtccattggtgtaaaaacgactggagtaaggtatgccacgcatgaaaccctccgtcgtaaacttaaacaaaaccctatggcccagattcccctgtaaagggatactgtttgttatatctttctctatcaaaggctctgtggcagctgttaaaacatcccagggaagaaaggccagaaaagttcgggaactattcctctcatgctcatatactgtatacgccccctgaacttgcttgtgagttgcattataatagacactctgcaacagggcgttcaattgaaaaaagaatcttttcccattgcgttgaaattcaacatcatttttgaacaactgcttgataagcttaaagtccttatccaacaagtaaattccttgataactattcaataagtacccttcttccattgctgtaaaactccctcccattggtaccaatgctcctgtacggtggatacgaagtgtaccgagttcgctaactttcatagaacgtacattcttcaacgcagcctgtacattaagggttttcactccggcagtttctatcttggcctgatattttactccaacgggaggtgtataatcttccgcaacttccggcattgcagcagaagccgccttcacggccgtttcatgttgcatggcttgctcgtccaaagtccggacaatttcatccttattcatacccggattcttagagctacaagctataaaagaaacaattaatacaatataaatcagttttttgtgtagcatatgtttttcgtattcgtttactttaaatatagatggcaacaaccataccaaatggttagacagttaatatacaaagatttatctaaatactttctactcaaaattgcacgatatcgtacaccgaatgcacgcttccgtacactactatctcgaaaactttctatatctttgcaatgggtacgcgttcgtccgcctaatccgtgtcgtccacgtaccaatcttcaccaacaagtcaaaccaatccttttgaattatgatgaaacgaggtaaaatcttaatcgtagatgataatgaagacatcctcttcaccctgaaaatgctgctgcgccctattgcagaaagcataaccactctaaatgacccaagagaactgttacctatcatttcacgtacccgtttcgatgttatcttgctcgacatgaatttccgtcaggatgctgtcagtggcaaagaaggatttcattggctggaagagatactgaaactggatgcaaaagcagtcgttatctttatcacagcctatgcagatacagagaaggctgtacaagctataaaacaaggtgccacagattttattcccaagccttggcaaaacgagaaactgatagccaccgtatcctccgcactgcaactcagtttcagccggacggaagtagaaaccctgaaacaacagaaggagactttgaaaaaacaaacagaagctttgactcttccccctgagccaacgcgcgtcatcggtgaatctgccgtcatgcaagctatttttcagacgataagaaagttctctgaaacagatgcgaaccttttgctcctgggagaaaacggaacgggaaaagacttgattgcccgctacgtgtacgaacagtcaccccgcaggaatgaaatatacgtacctattgacttagggagcattccggacacgttgttcgaaagcgaattgttcggatatgaaaagggcgcatttaccgatgcccgcaagaataagccgggacgtgtggaagtggcttcaggcggaacgttgttcttgaatgaaatcggtaacctgagtcttccactccaagcgaagttgctttcagtcattgaacagagaaagagttcacggctcggctctacaacttcatatcctgtagatgtaaggttgatttgcgccacgaatacggatttatataccgctatcgacaacggacaattccgtcaggatttattgtatcgcatcaatacgattgaaatccgtattccgcctctgcgtgaacgtggaaatgacttgttcctcttggctgatttcttcctgcaacgctatcggaagaagtataagaaagaacttcggggaatttccagagaagcacgaaagatgctgcaactttaccgctggccgggcaatgtgcgcgaactggaacatgccatcgaacgtgccgtcatcctctccaccggaaccatgctgactccggatgatttcatgttacgcagcccccgatcttccaatactgtttctgagaaagataagtataatctggaacgaatggaaaaggatgcaatcaatgaggtaatgagaatgtgtggtggtaatattacattggcggcagaaatgctgggaatcacaagaacttcactttatagaaggattgaaaagttcagattatgaaaagacaaacttgggtaagaacgccactttggctcactatcgcattactaatatgctgcctcattacggcctggctggctgtgcatgggttttattatagcctgttcgtggcgctctgcctcacagcattcgttgcttatgccatatataggtatatcttacgctcagcccgcgccatggctcagtttatctggtctgtgcgctactctgagttcctgtcttctcctacttccaatccgaatgccacaccaccccttcccgaagaattgctgaccgagatgcaggatgctcttgaatattatcggagcaatctacaaaagaaggaaagcgaattgcagtatttccaggctcttgccaatcatatagatatggccatccttgtttatacgcccgacggtcaaatagagtggatcaatgatgcgaccaaacgcctgatacatatcaatcgtccgcatacggtaaatgatcttatagattttcatccggagctcccggcaaagttgcgtacactgaaagctggcgatttgtctgtatggcaaatcaaacaggaagaagagaccgtacaattcgccctttccagtatggaatttattatccagggtaggaagcttttgattgcgggaatgaaaaatatccattccgccttggataaccgtgaaacggaagcctggcaaaagctaatccgtgtgctgacacatgaaattatgaattccatcactcccattatttcgctgacagagcttcttaccaaatatgccgacaacttggaaggtgacgaagataccaaaacggaaatcaggcagatgctgcaaaccattggtcgcagagggaacgggctggtacgctttatgaatagctaccgggaagtatcgcatctgccccaccctttattgaaactttataatgccggagaattactgaaagaagttgttcagttaatgcaaaatgatacaaatgatctacacctctctcttcccaacattccgttgcgcttgattgcagataaagagcaagtagaacaagtacttatcaacctgatacggaatgcccgcgaaaacgaagcgacacaaatcactctttccgcgggcatcaccccaggagatcaccttttcctgcgtgttactgataatggaaccggtatcgatccggaagttcaggaacgtattttcattccattcttcaccacaaaacctaccggttcaggtatcgggttaaccatctcccgccaaatcatgcaccagcatcatggcagcattacagtacaatcaaaagtgggagaaggaagtatgttcacacttctgttcccgatagtttaataaatgatgcgaatcaggagttaccctttataaggaaaagtaataaataaaatgatgaaatactatctcaatttacttaatattggaattagcatttaattcataacccgtcctaaagacgttaattcaactactgattcgcataaatgattaattccgaatcactctacaacgcttttttgtataaatccagaataatctccttcgtcacctcgcgaggattgcccggtgtacaaacatcggcaatagcagccgtagccagcttatcgagatcgctttccttgatacccaattcagaaaggtgttgcggaatacctactcttactgacagtgctctcaccgcatccacggcagcacgtgcagcctcttcctggctcattccttctttatatactgtcatcgccttagcaatttccacatacttatcaagcgcagcaggagcattgaattccataatgataggcagcaacaacgcattagccacaccatgaggtatatcgaaaatagcacccaacggatgtgccatgccgtgaacaacgcccaaacctacattagagaaagccatacctgcaatatattgtgctaccgccataccattacgcgcttctgcatttgttggctcaaacacagccgtttccagataacgggtaatcatttcgatagctttaatttcaaacatatcgctcatttcccaagctcccttagtaatcagaccttcaatagcatgtgtcaatgcatccagtcccgtagaagcagtcagccctttaggcaaagtgtacatcaattcggcatctacaatggcgatggcaggaatatcattcggatctacacataccatcttcttttcattcacttcgtcggtaatcacgtagttgatagtcacttcggcagccgttcccgctgtagtaggcagagcaatgataggcacggatttcttctgagtcggcgccactccttccagagaaaccacatcactgaattccggattattagtgataatgccgatagcttttgatgtatcgatggaagaaccaccaccaatagccagaataaaatcggcaccggattctgcaaacgctttcacacctgcatttacattactgaccgtaggatttggtttaatatcgctgaatacaacatagggtatgcctgccttattcagtacggaaagcaccttgtcagctacaccaaatttaatcagatctttgtcggtagatacaaaggcttttttcaagccgagacgtttaatttcctgtgggagcacttcgcgggcacccggtccgaagtaggatacttcgttcaagacgaatctgttaatcataatacgataatttaggttccgcagtgtcattttgagattgagtgtgcggaaggttgatacttcattttgttccgacaaaattaagaaatatagaggaggaagggacaaaagattctgatttttatagtatgcggaatgtttttagtaatcataaaaaataagttcttcatttaaatgacagcaaatcattgaaagataaagcaaacatgctatatttgtactatcattgaaacgattattaaaaacgatagatatgggaaagaaagagaccaaaaaatattctgatattccggtgtaacaaacgaacgcttccgaaccgttaggtatctacggagatattattgcacaaaaagataaatttgagcaggaatgggaacagggactaaccgttgaggatttccgcatgcagtgtaaacgcaaattaaaagaaatgtatgctcgcaactaaaatccttatacacccttctgtttcagattttttagaggaacttccaacagcagttcattaccacctcagcccttcagccgaaagctatttttcccgttacggagaaaatatgcaatacacttttttcaaaagaagcaagtcaccccgtacaacatggtatatctttttcattaaacaagacgaacgtattctggttaagtatataacaaacaatcacaaggaaggacaatacatacgttaaaatttgctacgagctaccagtaacgaattgctgcgctgtactcgtaggctaataattattcgcccagctatcacactgaaaggtacttgtcactggtagcttgtagctcgtcactatttaaacctcgacgtatccacctcctctctcttcttctccctgtatcctccgaatttatacgtaaacgacaccccgatttccctgaaacaagcataatgattcgtcacgttctgtgtaccaaagcggatacgtggttttatctgtcccgtctcaaaaatatcattgcaataaagattcagaatagcctttcctttggcaaagccataccgcaaagcagcatttacataccctgaagacggtaaatcataaattccctgagtcgccttactacgagccattcctgtcagtgtcagtttcagatcaggcttcttagagagagtgaaagtatttgtcagtacggcaataccataacaaatattccggttaaaaggaatatcccagaaatcatcatccttctcatgatgccacacaccaatcaaagttaaacgagagtttaaccattgctttatatcaaatggtatagaagcttgtactactgcttgttgctggtaattaaaattcaaatgcttatagatttccaccagacgttcggaagattgataaagagtctgggtagagtaatctttcgtatgggcaaaccatgcgctaaagatgtatttactcttcaaaatatgtgtcaactgaagttgatattcctgagccggtttcaggaacgggttcccatgtatttcagaatacccaccgcccagataagagatagcgtcctgcaccgcccaataatcaggatagtccttatcactgctcaaagccaattgccagacatagccgggggcaagcatataactcaggttaatggtaggataccaatcccactgattccataccggcgtcttataatgttctacggcaagtgaagcgtccagggaaagtttatcaccgaaacttttattgaaacccgcatagaagttcagagtttgttcgcgacggcgggattgcatattatcgggaatacctgtactcacacctgtctttgttcccgcatccttctccgtatcataataatattgataactatggtcgatactggtcgtataaacggcaccataattcaatccccatccacgacccagattatgctcttgggcaaggaagaatttccagcgattgatgcgctgacagtcttcggtataaaaggcaagctcttcatcttgcatgctgctatgcaataactgatcggacggagaacggtaataagtcagttcagcaccggctttcaatccgaaaggtgtacggtaatccagacgcccgttgtgcagccaatcggtactgttgctacgggtattggactgctgcgtaccgtaaatatccatcagactatgatgagtcgaataacttccattataaacaaagctcaactgatggtccttggcaatattataatccgttcctacccggaaactatgagtatgtgaacggcttcggcccatctcatcggttgtgatgtgatgaaccgaaccgtccgccagagagtgcatagcttctttatcggttaaagaatatccccgtccgtggttgtgtgagtaaagaaaatctgctgagaatttatttccgttatagatcaggctggcacgttcgttgaagccctcgtaatgtttctgattatatttgccataaagctctccctgccaggaagacgggcctccggtgctttgtttcagtgtgatattgatgagtgcaccccgcacctgatagcgtgccggagcattgtacatcacttccgccttctcaatgcgactggacgggatgtttttcaataaagaataaagctgttcggcactcatggtggtaactttgccatccaatattacagttaccccctgccctgccaacatcaacccgccattcatctcggttacgcccggcaattccttcacagcgtcataagcattatctacgggtagattaccgataagaagcggaagatcgtacaccagtttgccttgctccgctttcacgatgggacgttgtccggtaatcattacttcaggaagagattggtaaagactgtccagctgcttgtcttgtgttataatactgtccgcactgagcgtccgttcgctctctacatctgtactcttcgttatttcctgagcggaaactcctgcactcaatgcacatagcatcagggaaagatagtaataagacttcatgttcatttgttttagatacgacataaatgtgttcagacttagagatgattgggtgtcaaccttggttgacaggtcgattaagcttggttgacagatccgttaaccttagttgacaggccagttgaccaaggttgacacccaattatgcaagggactgcacaagattctctctataccttttgcaaaagatgccttgtgcaaaaccgaatcatcccttaagctcttgcactgcaaagtacggtgaaatcttccggactttgtgttatccggaacttacgtagtcttatctagtgttatctgaagtgttatttagtcttatcgccaattaccaaacaaaacaaagaaaaataaggtaatattatcactaacaagctgattaataactttatatctcatttggggattttgtgaagataggctttaaaagcccccaacaagcctgtttcggacaagttttagttaccaaatcgttacctattttcaaaaaattagttaccggtaactaataggcaataagttgtatttcagcatattacaaagatgatatttcatagcactgcttcgtttttcatagagaaccacagaaaagaaagtactatttttatcaccaaaaaaaatgttcttatggaagaaaagaaatcgacattcaaagtgctattctatttaaagaaaaatgcacctaaaaaagatgggacagtacccatcatgattcgtaccactattgatggagttgagaaaacaagaagtgcaaaagttagtgtaaatcccgaccggtgggataaagcaagaatgagagtaacaggaagggacgcctacgctacaaaaatcaacaatgcgctagatctctgggaacgtaacattggagccaaatatgatacgttgttccattatgagggatatgttactgctgagaaagtggataatgcagtaatggggacagatgctaagaaaatgactctcttaacatttttcaaacaacacaatgatgaatttaagttgaaggtaggaaagaccagagccgaaaatacccatcgcatgtactgtgatgtatataatcatgtatccaatttcctgaagttgaaatataatttatctgatatcccattaattgagctcaaagaaagttttattaaaaattttgacttctatctacgctgtgaaaagaatttcaaggccaataccgtacgcctctatatggttccattgaaaagactcacagcaatggcaaaggatgataacatcatagccattgatccattcaagcattttgtagcagaaaaagaaagtgttgatataggatatcttacaatggatgaagttgaagctatgatttccgctgatttaccgactaaattattagaaattgtcagggatatgtttgtcttctgttgcttcactggtatttctcatactgatttgaaaaagctcaccaggcaaaatattcaagacttctttgatgggaataattggttgatatataggcgaagaaagaccgatataaaatctagtataccattattagagattccaaagaagatcttagaaaaatatcgtgattatcaaataggaaatcgcgctttccctgtccctgagtacgatccgtgtaataaccttataaaaattgttgctggatttgcccgtatagataagcacttgacatttcacatgagccgccatactttcgcaacgatgatgttgtcaaaaggagttcctatcgaaaccgttagtcacatgttaggtcattccaatataaccacaacacaaatatatgcaaggatcaccaatcaaaaaataagtgatgacatgcagaaactatctgaaacattacacaattttgagaaagcgctagttgataaaatataataaaaaagtctgttagacaaccatttgtctaacagacttttttaatctcgataggactcttcttattcctaatctaatacgtccagtctactccttatatagttttcttccaataagttctgtatatccgattctttataaattacctttcctggtaattgaatatatggtaaaaaaccatcattcctgtaagattgcaaagtcctttttgagacatgcagtattttacacacctgttcatgatccaaataaacctctccattcatagagggtctacatgtaattgatatactctcgatctcagccttcaaccgatggattatcaagaacaatttctggattacctcatggtcttttgttatcaattccattgttgtcttttgttttatttttcaataagttctctacatcactcaatttgaaataactcttccgagaaacataactataaggcaaaataccctgatccttataattttgtaacgtacgcttactgacattcaacatcatgcacacattctcattatccaaccatttgggatgattgggcttaaacttacttaataaactttcagccattgagatcgcctcaatgacctcattttgaatttcttcaaatgttgctttttctattgtaactacttccatatgttcatcctattaattttcatacgacaaatataaatggaatggccaagcattatattaatgtatagactgctgtgtcactgtttgcatatctttgcttctattttccaatccgtcgccaccacgttatacaaatcaaaggtaaaatcatgctgttttgatccatttatgcttctctttaactaatgtataacttgtctaccctccattttacatcggttaccatttggctgaatttgtccaaattctgtcccgttttgtctgtaacgaaattatgcagttctggaagaacaaccttaactttgcattcaacaaaatctatcaaatatgaatggtgatttaagagtatcgttcaagcctgttccggctacaaattatgttcgcatgacggttagcgttaacggcacacgttttcgtatgaccttgaagcatataatcccgtccgatttccaggaagaactgatatccttatcatcaaccctgtttcgtatttacaaagagtcactattgcagcacaagcctattacggccaaagaactgaaaaagcagcttacggcctccactccttcgttattatataaaaccatataccgatcctgcacttctcattttctcagtattggtaaaacaatatctcttgaacaatatcagttccaattaaaaaccataaagtctatacctatattttgccaactaacctatggaatcccggagatatccatattagcactacctgatacatttttagaccagttagaagcattcttcgctaatcattcgacagagaagcaccggagccgggaacaagtacagttgatccgcaccatcttattgaaagaataccgaaaaggtaatatcaaactatccgatcctttaaatcagcaactgactctacataacattctggaagaactcacaccggaagatgtattttaccttcaggaagtccatcttccttgccactatgcagccataagggatattttcatatttagttgcttcactggtttgaattatgcttcaatcaagcaactgacgtgtcgtcaattacgaacaatgtccgacggttctttatggctgtttctgaaagaggaacagattcccctacccgacttgtcgaaacagatatctaataagatatcaaaaatcagtaacgatcagctacttttcaacaaaataccgacgatacaattaatcaatcgagtcctccatatcatcgcattaaagagcaatatatacaaaaccatcacattcaaatctgcaggcaaatattatctttcccagcagtctgtgacaaaaacaaaaagatgaaacttaaaaattcttctcttcctttaatcagaaaatataattaccatgacattttcttgtttacttttaaccctttattagtatcacttacagttgaaatatagccaacacttttaagaactccgagtagtcttgagttaaaaacggtattttcaagaataggatgtttttgatcatgtttcgcaatatccacataaggagatggtaattgacataataaattttcaataaggtctatattatcaccttcgttctcaatggagtaagtagcgacagtaatccggtcgttgatgttactggctatccttaggactgtataaagaatattctcattcaagtctatccgttcctttgtaagaagagaacaaatctctgtcgccaaatcgctattatcctttattgtatcaagattcagtgctgatacaatttgagacttctcatgaatcgtaaaagcactcgatttcaaaaggcatatcgcaagatctgccgtatatttgaaagtttttacttcctgtaaaaaatcattcttatggctaattaggtattttgccattattggtaccttatatgaaaataatgcaagtgtattttcattcgtatatttaatcttatttctatcaattagaaaatcaactcgtctaggctcaaggttaaagagagaatcaccatcgtcaattgtattatcaaacgaattaaataacttcttgaatgtatctatattcaatttatttgaaaccaagagtaaattaaacaacagatatttgacctctatcgaatcaacacattctaaatatcctaaatcatctccataatgttcaatgtatgatatcagattctctgaaacagatttttcagaggaacagaaatatgacgcaacattctcccaggttggctttaccaggaaaagcttaacagccatatctctaaaactttctgttatgtcctctatattttctattcgattacgttgatttgtcagataattgatcttatcctcttcatctatattttcattattcaaaatgtacaagagagagtcctcctcttcatcattaactgtgtcggagaactgctccaggcagtaatcaatattattctctatatacaagatgaaagcattgtttcccgttctttttatgcgtgacaaattaagattaccggcattgacatcatcatctttattcaaatagtttgttattatgcacagattctccttattcggtaaatagaaattattggcaattataaaatccaatagctcacgggaatccgtattaaggataacatatctttgttcctttgacagtcgttttgtctgctccagtccgattacctccatatgatccgtcaagaaagtataattgtcatttagccattctttttgttcatcaagtaaattagcggcatcacagaatctaagccaaccttctataaggactgtacgtcctacagtatcaccgtattcaatgattgtcgtccaactatcttttatgctccattctatataacacttgaatagacttctggcatatttactgttctgatagtactgaatcataaaatctaaaggaacatctgctcgttcaatccgtttcaccaacaactcgtatttctcctggaaggcaggtttctgacaagaagatattagaaaatcagccaaatcattattcagaacgcaatcatgattgaatacatacaatggaaccttcttggcaaaattttcgactttatcaatatgggcttgataatctccttttatcgtctgtttcatggccagcagcaaatccctgtcattctgtgacaccatatccggatagaaataagagatataatcatagtattcctcatcaatatacccccgacgtataaagacattcatcaacggttctaattggattcgagtaaaatcttcacactgagtaaaatcaaatgcagaaagtaactgtgataactttaacgatttgatacgtctttccttatatattatatctttccgttcttttataatttctttaggaaaatcttcaataacctttttccgttcccagtaagacttacagatagattccggtatatttaaaacgcgtctaccatttaggtgattataatcttcatatacatactcaatttctttcaatgataatatattttcaaagattgtctcgttatctataatcacctgaatatcagactggttatcgtttgttattattaatttaggatatcgatacatttcctttataatctgatatgctattatacttcttaagtctcttttagaaagatgggcattttcagtatgtagcttaattttttcttccaaggcttttttctgattatcaagtgtccgttgggcatatgccacaaatttactttttgatgaaatacattgatatactttttcttcacggttatgtaacaatgcaaagtctcttgggaaatagttcttataaacaatcattgctaaaagttttgtcggattcaacgatatttttccggcaacacaaagtcgtttacgatattgctggtattcatttgcaatattgcgtaacagacgcatatcgttaataaaaaaagcaatctcttccaaatcatcatctggtatatcttcatatcctcgtatgcggagttcctctttgagcttatcttttgaatttgaaggatttatcacagggataacagtagatatataatcaaaaaatttagctctttgtgaatccttgaatacatcatctttaactgcatatataaaagtgatatgtcgtccgatttctttggagtcattaatcagttgattcaactctctaagtttaagatatatgtctgacgtattaaaacgatcgagatcctcaataattaatacatcgtaattcgtgacttgaaaaaaataaatgatttcgtccagatgtttgttgaatatggatgtttctttttgtaactcaacttctccatctttcagattgagtttgctaagtttatagccgcaataggtcagaagcgccttccggacgcagataaacaaacaggcaagcatatataagacactaattatatcaaatattgtattggtagtcacaccccaatcaaaaaccttatacatcgcatctacacgtaaccacataggttcaaacgcaataaggtaagcaataaagaatccgacaatgcccaaagtccatttgcataacttccctttttcaaagtgaaaaattcttctgaatcgggaatttggtaggttctcatacttctcacgatatatcaattgttgaagtatactgtactcgatcaagcggtttagcttctcgacttcttctttctgcttcttgtccccgtcaggaatatcatatgactccaatgttgccaaagatatctgcaaatagtgatgattcggataatgtttctgtaaagtaaatagcactgaactttttccagagccataaggcccggtcaaagctatatttcgtaaattactatcagacttaagtttatctcctatctccttgacgggaagatattgcggctctttttcatctataatcgtgggcatcattgtctgttgttggacattaatgtcagtagagtcttgttgcataattctatttgtcatattcttaaaaatactaggtatattcatgctgtctaactgctttatatatgcaaatttacaatatatttccggagcaaaaaaatgtctgtatatattaaattatttcattgatttcagtttcgctttccaatattatgtgagaagcttgttgcagtgattggcactttgagttttatattcttcttgtgaactgaaatatagctataacgaaatccgaaaactccgcattgcaggaatacatggaaaaattcaggaatttgcctcccgctggcacaaggccgcagatattaaaaatgacatctttagaaagtttattctcaattatctatccccgcttttcccaacctttcagattttctctttacttttgcccacgaatagcaaccttagatacatcaaatatgaataaattcgttttccagtgctcgctttcaactgaccaggtgaacttgctgaaagaattttccgacaaaatacatattttaacggcgatgcagtcgtacagttcgaagaacgtggacaattttatttcctctgttctaaagatagcaatcttcagcagcactatactaacgataacggctggttaattacttatagttatccatttaacgatgaattaattattggccaggggttacatgaaagcaccacctatgccggctatctacatacctttgaagacaaggataaagtaagaatgtggaatgacattttagacttcgtcttccgcagtgattttcatcgggtattctttcctatggagaattatttcaagggctgtctgaagttggataacagcctttgtttttatctgtacgattatgttctctgaaagccagtacagatctaaagaaaacgaccaatcttctcttccgtatgaaagagggtcatgttgtttccctcacagcgaaactcttttcgttagcaatgagccgcatctataccatcaccgataagaaaggcaattctattttaattccgatcccggcatccacccgcgacaggcacatgcaacgattttcatatttctgccatctgttgtccgaaaggacgggcatcaggaacggttacaatgccatccagatagaatccgatcgggctgagctcaaaggtgtccgtaacgtagataaaattttcaacctgaaattcaatccatcactattcagcgacaaacaagttatactcatcgacgatgtccttaattccggaaccggctttatccagatcaaaagaaaacttatcgacttaggcgcaaagtcagtcattggggttttcctggtaaaaacaaaagaggaagaataagcccttcccctaggaaaactatcacagatataagattatggggtcgaggttatttcttgaaccctttaattatatcctttttcattttagcgaaacatcggttattatcggatataaatttctcaccgaagagatcctcttttattttttcttccgtatagcgggtactaggatcactttcggcaaaaacattgtgcaacatctttatttgtgccggagaataatcttgtaaaagatcaaataaacgcaacgcttctcctttgtgatagttatagcgttcccgaagatgaaacatatcgacagatttttgatataagggattattataatgaaacgtgattttaaaatcatccggacgcgcctgactattaagtatcgcgaatgtgtctttgggggttatagagatttcaacggaattgtcaaaattataagtggaactagtcgggctaagcaaactcatttccgttgcatcagtacccaatacatcagtaccctttagtcgctcattacatatcggacagcttggcacaaagttaaataacgaaagccctacaatcggacatttgcttttcggcagcacatgatccagatcgtaatgatttcttttatagttatctacttgttggctcttcttaatagccggagagtgccaaattgatagtgcatcaaattttcctatattaccggaataaggacgatttataatcactgtttttgcacttttcaaggaaataggctttccgtttgctttgggtataaaataagtcaaatcctcaagagaggctttatctaataattcttccacattttgaaataacattttatatccgtaggcatttatataagaaatctcacaataatgacaggtatgaattttcaatttatccgcacgtctcataaagaaagcggaaatatctggttgaaacattctgatcttgctcgttatctcatcatcatcttcttcttcaccgctctttttcttggtagttttggaatagtgaaaaatcatttctaaatctttgcagtcctctgatgatatttgttttgtctctacaagctttgtgaaatcgcaatacaattttgccaaaaaatcaaagtcagcgatcagaatatcatctatattgtctttatacaaatcaggcttagagcttttttttcgcaatttatctcgcaatggctcccatagcttttgcatctcacttctttccttgtcaaatatttgaagatattcctttttcaaagtggtaatatcttctagtttatattcaattcttctcatctttttctaactcagctatctggttgtcgatattcttcaatttagattcagtttcttcacgttcacgatgcaacttctgtaatggagtttcatcaagtgaatataattcattgagcattctatgaatagttgatttcagatagggatctgctatgatactttccacataatagtaataatctttattgtcagacaagtcctttagggcacgttccctatcttcatctcttttgccataaagtgtgataatacgatcaagcacttcacgagcaatttcccccattgggtatttcatgaagaaatggctttggaggatttcatgaatatttgcgctgaatgtctgctgcatctttttaacatgacgcccatcttccaaatagaggatgttctcaagcggaacatcactcaagacaaagggggaatgtgtcacaattataatgttgatagaacgtattttacggcgatctatatggcaccaagaaatcatttttaataactctgagacgaagctacgttgaaattctggatggaagtaaagctctgcttcatcgaatatcaagtttatatgacgataaggcattctatattcatcctttttgacactttgtatattctttatgtgataaatcacatagcttagattaaacagcatttgtttttccccactactgagccgggataatctaatctcttcttttattttcttctttgtttcactaacttgaactctgcggtgtaatgtcatgtcacaaaagaaaaaaggaggaggcaataatttgaaaacctgatcgtaagtgtcatatttcgtcttttttttatcctcgctcgataaaaactgattatcaaaatcaaggttatgcttaataaattcctttgcattaactgttattggattttctacagccaaatagccccgctttaaaaaggtaagacactgattgatttttagtgtaatatgattatcctcttcaagagagcggatcttttcaattatcgtattaacttgttctttactaataaaagatgcatccgagaatgattcaatgtttattattcgaccaaaactctcataagtcatacatattttcagagttttgtacccaaggtaaaataatattgtttcttcaacaatggggttattatgtgcacatttaaattccttatttataatctctttccaacgtttggaaaatgcattaataagagaatccacattagaagaactcaattttttccttactttgtccttataaatttttagggtatcatttttataattctgattgaaacaatattccagttctaatggtctgtagccattgataaatgccttattttgggattcaaaaagtaaaaagagtgtcataaggcgttgacgtgccaattctttttcattagtgacatcaataattccaccttcttgtctatacggagtcattgttattggtgcgagatatccatcgttcttgtgaaaaagcccataaagccatttgccctcattacttgatttttcaccagtttgaatatctaaagaatcatagtcatcatcatttagtgagtaaatactataattcgtactgatggtatagaagaagttatctagtattttatagtttctacgtaatggatctctaatctcgttaggttgcctgtctttattggttccataaaaatagcgaacatagtcatctttattaagtatggaacccactgttccgtccgtttcgaaatacagttgcgcatcaagaccttcagcaaacgtcaatttacgtcctttatagtcctcactattaggcaataattcactggcgaagttattaatgatacggaatagcatttcaagtagtgtcgatttacctgaaccgttcgcaccgactacacaacttacacttatagttcttggcaatggatcacaggtctgatataagttttcggccattgatcctggcttacgccattcataattattttcccaaacaggttcaacaaagtcaccgaacggataccaacccggttgaaggtttttgatcacattctcttttccaccatctaaacgtattcctataatatgcataaattttaagttattaatcttcgtaatcaataattgataaagctagaaatattctcttttaacaaaattagtatttttaatctttatatggaattatttttaggatttccatatctattatttttcaatccattggtttacgatatcatttccggctttcctaattggatgaagcgtattcctttacgttcatttgctttacacttcttttcccgcttgatcaactttccactttaggatcaatgtcattaccactttcatctaattcttattcaccaaatataccttttttaattgattggaaaaattcctttactgcctggtaaaacatcgtcgaaggtatatccgtggcggttactgtttaataattatttaaaaatctccagacctccctccgggcgctagtatttataaaataattcttgccttgtaacagcaacagaccttcttattgccgatgttcttcccagtcagttaagggaaattttaatggttcggggaagagcgacaagcgatattaaaacaaaaatcaaatctaacaacattaaaaaaacagaagatgaacaaattcatgatttcaaaattcaagagtacttgccatgaaacagggaatgtaatttcaaaaggtgagcacatactgtatgacacagccagtcggaaggcctactgttctaagtcacaaaaatacaaggcagaaaaggaatgtgagcaaaccgcagcctacatacaggcacaggaagatgcctattttgacaacctatgctacaaatacggaatataaatcacaatcaatcagaaagaagcattatgaaaacaatttatttgcaaagacaaggtagtacccatagttacaataccaacaacagtatcaacagtcaactgggattttatattggtatagaaccgatgcgtaataataaataccacataacaatcgcatcacgatgcaagcaaaaagaagatacggaacaaagtaagacaataataattgaaataactgctccatcgttatcgagtgtattcaagcacatagaaaaagaaatccgagagagtttattcgaggatattatcattgcagatacgatagaaatgtactgttataacaacttttgctatgaaccagtcgaggacaaatacttagctgtatgtttctatgaaaaatcaaccgaaacaataaggttatatcctgaaaattactgccttgtttccttcaatcacaaaggaacaaaagactatctgcaaatggatagcgcgacagccggatatttacctatccttgaagaacaagccgcagaatacgagaaagagaaaaactggacttgccatcaggataaatcagaagattttctccgggaacgctttacatggctgattggagaagaaatcaagaagaaaaataacaatgtgaaattttgcatcgtggattctctgattagatagaccagccaaaagttggtgtgtcaaatcctacactcaatagatatttcaaagaagtattaggtatatcacccaaacaatgctttaaagctttacgctttaaaactgcattgaagaactatcgtgcaaatggtagttatgatttatacgacgaattaggatataccgacttttcccattttgtaaaagaagctaaaaatttggcaaacacaactccatcagaactataagaaaaagagaaagtaataaagactataaaagcacattaataaaatattatctatgacaatgaatgaaaatatgaaactttggaaatacagtgggacatttcttgttataaccaggagtaatccacacagtatatgcactattacttgggaaagaggactttacggacatgttaaaagatggattaataaactccacagatgacagttacagccgtgctttcgccctttggtttttagtatgtgggattatacttattctttgggggctaacactccaatgctatatcaaaaaagagcagaaacccgcacctctggttttggggtattgtattttggcgtttgctgtggttggatgtatcatagagccgatttccggtttttggctgtttttgccgcaagcattgataataattactgcaaataagaaaatggaaacatgaaatacttaaaccaagaaatagaaaacgaattaaataatcaaggagcagaactgatacgttttgtcagtatatcgcatttagacgaaaagcaaaacagacaactcccgaacgccattgtttttgcacttccgctaaccgcagaatatgctaaaatggtatttaatattcccgactacgtacaagtacggatagcggataattacaatttcgacgatgatgaatattcgcaaaccgaacataaggcgggagaaatagcagacgaattggccaagttcatcaccggaaagggctataaagccatttcgcaatccgatacgggattattagccgacggcgtattcgattatgaaacaaaagaatcagtattgccccataaaaccgttgcactacttggtggattagggtggattggaaaaaacaacctgctaattacccctgaatatggcgcagcacaatgtctcggtacggttttaactgatgctccactggaaacggtattgcatgaacctctatctccaaaatgcggaaattgcattacttgcgtcaatatctgcgagagaaaagtccttaaaggtaagatttggagtaaatctgtttcaagagatgaaatcgttaacatacatggatgtagtacctgtttgaaatgccttgtgcattgtcccagcacacaaacatatataaagaggaatattgtctgaatttccacaagtaacaaacgagggttcacaaaaataaaaacggaagagaaatcaatcccttccatttttattcttatatttttccataaccaataatcgaaaaatctaaatcttccgaattactctggcgggattacctgccacaatcgtgttcggttctacgtccctggtcacaacactacccgctcctacaacactattctcaccgattgtaactcccggaaggagcgtagcccctgctcctatccataccctacgacaaatatgtactggcttacaagtaattatcgatcgattgtcgagatcatgattattcgatatgagttgcacattagctgctatttgaacatcatcgtcaattgtaatgcctccggcagacatcatcaggcaaccattcattataatgacatggcgaccaatcctcacttcatggggacgaacaactgtaagcggagtattcacacgactgccttctcccatattcgggaaaagtcggtgaagcagttcatcatattcgttcgtcatcggcatagtatggttcaggcgaaagactaattgtgcttgttctttcgccaaagcaaggtctgcttcactcagatgtgcacagtctattcttatttctttcatgtatattattactccttatttcagtgtcttaccatccgaaaaagcattacctacctttttacccacttccaggtaatcgttattgaacggatcaaatataatgggagatactttggatgcatccactttaccgttttcgtcaagaacgcgctcatctacgcttacgtttattatttcacctcgcaaaatacaggtctctgggttatagtccttcaatttacattccaacactacagacaattcgtcaatcaacggtgcatccacaaactccgaaggggtagcatgaaaacctgcacgggcgaatttatccggaaccctattaccggaaacaatacctacataatcacaggcaaccacctgcccgacttctgccatactcacggtaaaagctttacgcttcaggatatttgcagtcgttttatgtccctcactgatacaaatactaatttcatgcatctcgctgataccaccccaggcggcattcatagcattgggagtaccgttttcatcataagcagcgataataaataccggctgcggataagtaaagggctttgccccaaaattctttctcataataatttattttttagtccatttcttaatatcttcctttgtcgcaccattcaaaagtcggcccttctgccatttcagatcaggataggtttcctgcagctctttttctgcattagaaatactgctgctacccgatgttgcaaacgggataatcgtcttgcctgcaaaatcattgctctcaataaatgtattgatgattctcggagcagaattccaccaaatagggaaacctatataaatggtatcgtaatctgcaaaattatcaggctttgaattcaatgcagggcgtgatttggcatctgacatttctacactactacgtgaggatttgtcatgccaatccagatctgcagcgacatattctttttcaggttgtatttcgtagagcgttccacctgtaacttctacaatcaacttagctgctttctccgttgttcctgttgccgaaaaataagcaaccaatatcttatcactttgcgcctgtgcatttatggggatacataacatcatgatcactacaataatcatacctttaactttaattgctgccatggataattttgattttgatttttatgatgcaaaattacagaatagtacccagtataaaggtatataaatcacagattatctaacccaaattactgataaaagaaaaaacgagaaacaaccttaaagtttgaccctaacacaaaaccaatatcattaatgttacgaactttttcctagctaaattcatatttttactcttacgacttttcatcatctcaaacaaatcactacttttgtagtaaaccttggattaccattaatgggaaaataaacattaaatcacaaattatatcttgtatcaaaataattatgataataatacagaaagtcatactccacaactttaagcgcttccaacacttggaagttgatcttgaccctacaatgaatatctttattggagataatgaatcagggaaaagtactatactgcaagctatcgatcttgtggctcgtggtagcagaacccgcattgaaaatttaggtatagatcgtttgttcaatgtagaaacaatcaaatctttcatgacaaacattaacatggaaaatctaccagaaatgtttgttgaactatattttaatcctgtactagatcaaggtttagagggaggaaataacagcaagagagtacataacgcttgtggcataaaaatgatttgccgagcaaatcaagcacctgcatatagcagagaaatacatcgtattcttacgcaaccgaatgcagtatttcctctagagtactacaccgttgaattttacaccttttctggtgacccatacaatgggtacaataagaaattgaacaccattatgatagacaattcccagattggtagtccatacgcaatgcgtgaatacgttcatgatatatattatggaagtttgaatgaagcggctcgtgtaagtacaaaacatgcttatcacgatagcaagaaccagttcgaacaaactgtattagctcagtatagtgctgctattgctccttacacatttgctgtgaaagaatcttctgatgacaatatagagacagatataaccctcactcacaacaatataccgattgagaataaaggtacaggcttgcagtgtttcattaaaacagaaatgtcactgaaaagagcaataaacgatattgactcggttttgattgaggaaccagagactcatctgagttatatgaatatgctcaaattgatagatatgatcaaagaaacagagaatagacaattgttcatttctactcatagtgatctgatctgtactcgattgaatttacaaaaatgcatcctgttcaatagtacttctcaaactttcgcacaattgtctgctttaacaacagagactgctgaatttttcatgaaggctcctgataataatatgctacagttcgtgctttcaaagaaagttattctggtagagggagatgcagagtttatactaatggaagctttatacagaaacactttacaaaaggaaatgacaggcagtggtattggtgtgatagctgttgacggaaaatgctttaagcgttaccttgaaatagcaagaatcctacatattaaagtggctgtcattaccgataatgaccatgattatgtgaacaatattacagacaactattcagattatacacaggatcaatttgtcaatatcagaatttactcagatacaaacaacgaacattatacatttgaagtttgtatttacgcagagaatcaagaatggctggatacattgattagacctcgactgagaactaacacagtgttaggctatatgaccgcaaacaaagcagaggttgcatacgagttgctttcaactaaagcaaacagcattattgtacctcaatacatacaagatgcaataacatggatagacgcttaatactagcagttgcaggttcgggcaaaacaacctatctcatcaatcatctgaatctagagcgcaactgtctgattgttacttatactgagaataacctgatacatattcgaaaatgcgtaatacgtaagtttggttatgttccagagaatatcaccttgctttcgtactttcaatttttgttgcgtgtatgttaccgtccattctataaagagaaggtaagagccagaggagtatcgtggaatatgcctgatccgaagactcagaagttgaatcgtaatcaattaacattctacattacaaagaacaaatacctgcattacaaccggattgcaaagctctgccaatttaaggctgagtacataagggaaagaattgagaagtactatgactgttttatgtttgatgaagtccaagacctgggaggacatgattttgatcttattcgtatgattgtaccgcagaataaggattgtttatttgtcggagatttttttcagcatacatttgaaacaagccttgatggtaatttacataaggggttatataaggacttgaataaatatattaaagaatgggaaataactggcatagcagttgacacacaaacgctatccaatagccatcgttgttcaccaactatatgccagtacgttacagaaaatataggtataaacatagcgtcatacagagtagacacaacaaatatctactatatagataatcaagcggatgcagatgctttattttcagacagaacaaaagctaagttgtttcttcaggaaagcaataaatacaattgctatggcattaactggggagcatcaaaaggactcgatgactttcaggatatttgcatcgtactaaatgctagcacgttgaaggtctatctaaaaggcagtctttgcgatttagttccttcaacaagaaacaaactctatgtagcttgtactagatcaaaggggaatatttatttcattccgcatacattcacagataaatataaacaaagataatagaaatagctaagaaactaatgtggacagagtttaggtgcaaggtgcaactctatatataaatatagattgcaccttgcacctaagtaagcgacagattatcaatggtatttttcaagaaataaattttctattctgaaactctgtttatatacagacaaatccggtcaattaaaagcaaaaataaagttctatctcaaattccttttacaacaatattgaaatataaaacacgtaccatcctgcaatctataaatcacggaaaagcaaagcaatataatgaagtctattcggactacatattcgttacctattcaacacctatttatacaacagtcagattatcaaacaaatgcatcggggaattattttaatgcctgataacactataattacacaaaaaaattatatctttgcaaaaggagagctctttgaaaagcaaagcagaactatgaaacgaattctaaaaataaaatcgttactaaaacgttacttattatttcctataactttataaacatcacattatcaaaatattagatactttatttagtgttattgataaaatgaaagaaatgaagtaaaatggagaatcccaaaagataatagcttaataataagcaaattaacgagaataacaacgattatcacaggcataaatttgttaatgaaaaagcttgttactaactcgttacctactgttttttcaatgtttataagtatctgtacgaaagaccgttaattccaccatttagtgttatttagtcttaccgtccatacatgtaccggttatctttcctatctttgtccatataaatacaagagctacatgaaactgccattcaaacctattgccatattagtcataatctctctgctgggtatctttatttaccaggcatactggatcacgggactatacaaaacgatgaagcacgaactggaacaaagcatcgtagaagccatgggcatgagcgattataatgagatgatgcttcgtgtaaaagcaatgcaaaaagaaaataaagcccacggttccgtagaggtttcagcagggtacaattccgattccggaaaatcatttgtccgcagcagtacaactgttaaccaaacagatagtgccggaagtctttcacttttaaaagacggtatccctatgaagtatgatagcgtctcagtgagttacccgaatgactcgacaagagatatccttttcacacggggacaggaaggcacaaacatttcagtctgggcagaaaaagattcagtaaaagaggtcctggaagatacagtgattaatgaggatgaacctcaagcttctttaagagccgaaggtggaatagatatgatgttgcgcgatcaaagcagtatggtggaacttgccactttcatccagcgtggaatgcactcgggactggatatttttatagaacctgatatagccgtttatgatagtctgctgaatgcctatctacaagaacgggggcttaaacttccctaccgattggagcgtcttcattccggtgccgatccggactcaacgctggtttacactgatacgctcgccattgtcggaactcccggatacatgcccagtgaaaaagcaaaacaatataattatgctttcgacattcactccaatcaaagttaccgcctcacaatagaacctatttataagattgtattgcggcagatgagcggtattcttaccacatcattcgttatccttattatattaggtttctccttctggtttcttatccgcaccattttgcggcagaaaacactggaagagatgaagagcgactttaccaacaatatcacccacgagttgaaaacacctattgccgtggcgtatgccgccaacgatgctttgcttaattttaatctggcagaagacaagcaacaacgggataagtatctgggtatctgccaggaacagttacagcgattaagcggactggtggaacaaattctctctatgagtatggaacgccgtaaaaccttccgtctgcatccggagacccttagcttgcacgatttgttcccgacactcatcgaacagcataaactgaaagcgggcaagcctgtagaaatcaatctcgacattgcaccggaagatctgacaatcattgccgaccgtacacactttagtaatattctgagtaacctgatagataatgccatcaaatactctccggataaagccgatataatgatctgttgccggaaaaaggaaacggaacaagtggaaatctcggtcacagaccacggtattggtatccctacggataaacagcctcacattttcgataaattctaccgggttccgacaggaaatatccacaataccaaaggctacggactggggcttttctatgtaaagacaatggtagaaaaacacggtggcatggtaaccgtacgaagtgaagcgggaaaaggaagtacttttacaataagaatctgaataacattgcttattatgaaaatgaatcaagatatggacaaaatcaaggtactgctggttgaggatgaacaaaccctcgccatgattatcaaagatacgctggaaggccagaacttcatcatccatactgctgccgatggcgaggaaggtctgcgtatgttcttcgacttacgccctgatgtactggtagccgatgttatgatgcctcgtatggatggttttgaaatggtacgccacatccgtcaaaccgacaaacgaactccggtactttttctcactgctcgttcttccatcaatgatgtggtagaaggctttgaactcggggccaacgactatctgaaaaagcctttcggtatgcaggaacttatcgtacgcattaaagcgctggtgggcaaagcgtttacattcagagaggaaccaaagaaggaagagacctgtttcgaaataggcgattaccatttcaactctgtcacacagatattgtcccataccggaatagagcaggaactctcccaccgcgaggccgaaattctgaaacgcctgtgcgaaaaccgtaatcaggtagtgaatacccagaatatcctgctcgatctttggggggacgacagcttcttcaattcgcgcagcctgcacgtgttcatcactaaattacgacataaactttccaaggacgaacgtatccgcattgtcaatgtccgaggtatcggatacaaacttatcatcaactgaaacttccgttaacacataacgacttatgaaaaaactattcatcattctgttccttctcactgtttcctttcgcgttgctgcacaaaacgagcaaacaaaggacagcacattattgaatcgttttcccacggaaatgggaaaagagccgttgtctcctccacccggaacagctgctgctcctaatcgggatatgtcggtaaagacttctctcagcacggatagtacggacttacacatcactcttccgacttattatcccaactttccgtggatggatatcagaatgggaaagatggtcagcagttacgatcctttcgtgatggattacgagcattacggtgcttttcagctttcccccaatagtatattgagcacattcagcacctacaatacctaccctactatgggaacaattatccagtcaggcgccgattttatatatcgccctaatgaacgctgggaattgacagggggcatgtataccgccaagtacaccatcccttcgcgcatgcatggttctcaattcgacattggcttggatgcttctgccgcctatcgcatcaacaatttccttcgtatccgctttttcgggcaatattcaggctttggcaaacaaaactctctgaacggatatatgaatccgatgtatccacaaagccactacggtgtagtcatggaagtgaaaatcaacgattatctggaaatacagggaggcgtggaacgagcgtacaatgcttcgaaaatgaagtgggaaacagtaccgatacttgctccggtgattcatctcaatagaaaaaagaaatagaaaacgggctgcatttccacacgagatacagcccgttcatttaccggttagagaggaacaaatagattgcttataaaaccaattcaattatttacgctccaaagatagcaacaatactcaaatatcagcatataatatacaagttttattttaataaatgctatatatttccataattcatacttatttcttatattcgccattaaataaagaccattaagtgatgaaatatataggactaatcatacttttctgtctcctttctttcagggtaaatgcccagaatgaagtacccgctgacagtgttcgcagtatgaatatgccggcaacaaagaattttgatggattccttttggatatgaacctgatgaaaatggcagctcctcaaatgcccaaaatgactttagacattcccgatgccagcaaagattatagttttctgtttcgcttggacccgaatgtgacctactcacaaggctactcacacttattcagtttaggtagctccaccatatacagtatgaaccctttcggactgacaggtttcggatcatctccccaaaacctgcaaatgggaagtttccggctgaagaatggaatgcgcatcaatacttatggagagtatgacaaggacggacgaaaagtccctaatccttctgccctgccgtgggaacggaataacttcaaaggcgctttcgaactgaagtcggcaaacggatcattcggaattagaatcgaagtacaacaaggaaggaatggaccttactaaaaaagactacagtcaagggattatatactgaaataatatgaatatgaagaaaaaagtattggtaataggtgccaatggcttcacaggacgccggatcttaaatgatttgtcacgcaatgacgagtacatagtaacaggttgttctctgcatgacgacattgctcccgattccgggaattatcgtttcatcagtgcagacatctgccagatgggggaacaaagcgcattgttccgggaagtacgcccgaatatagtgatcaacacgtccgcattatccgttcctgattattgcgaagcacaccgtgaggaggcagacagtatcaatgtcaatgctgtgggacaattggcattccgatgcgaagcatccgctgcgcgctttatacatctatctactgactttgtatttaatggagatacagggcagctttatacagaagaagatactcctgaccccgtcaactattatggggcaaccaaactgaaaggtgaaaaacgggtaactgagctctgtagcaattatgccatcgcacgtgtggtagtggtctatggtgccgccttgccggggcaacacgggaatattctgcaattggtagccaatcgtttaagaaataatgaagaaatacgggtggtttccgaccagtggcgcacgccaacctatgtaggcgatgtttctcaaggaatagagaaactgataaatcatcccaataatggtatttatcacatctgtggctcggaatgtctgactatagccgatattgcttatcgcgtagcagatactttgaatctggattattcattaattctgccagtcactaccaagcaaatgggagaaacaactccccgtccccgtttcagcggattaagcattgaaaaagcacgcagagaactgggataccaaccacatactctggaagaaggaataaaactaatgttcaatctttaaataagtgattagtggtgagtgccactaatcactaaacaacgtttctgcaatcccactctccttcttatacacccgcaccatctccaacaactcatccccatacttttccactccttttttaccaaaataagggattcggagaagagcggatttatcttccggtaataaattggtgatacctaaaatagctttctgttggattacggtatataccggtaatcctaattgagacgcttccgcattacgccatgctaccagacgtctgtataattcgggatgcagaatatccgaaggaacttccactgctgccgtttttttccgtgcaggggtatttccactttcttcggttccgcctttccgttttcttctttcggtagaattaccggaacgcttttcccccttgcctttagtcgatgccgtatcgtcaatggaaagtaccgccttttgtttcaggtactctcctacatgaaagcccttgctgataacaaattccaacaagtcaacttttaacagaagtagatcatccaattcctcactggcagtcttcaactgtttctttagttctttattatctgtttccacaatggtactactcctgatagcatccaaaggttctaactgttctttaaaatattccgcccccaaatgaatacgttcctgcaagcttttatccgttgcataatcttcagcaccatcaaccaggcgtgtgtattgaaggctgaacttctgggcaactttcgttaccttctcatgaaaacgttccgtttctgatttatattcagtcaatagtttggggtagagcttatacaagtgttcatccaccaatctcacaaaacgcttcaatgccaactctaacggtaagaaatcaaacaatcccgatagcaattccagaaagtatgcttgttgcaatctcctataacgcgtttcatcaggttcgtttctacgcgcatcttccgtaaaagtatctacagcactgtcactgatgaccgctcttgccgacagtggagcgctcaataccaacccttccaatgttttacaacgacttaatgctacataagtctgtccgtgtgcaaaagaagcactggcatcgattattgcacgttcaaatgtcagtccctgacttttatggatagtaatagcccatgccagcttcagagggaattgtttgaagactccttctatatcttcggtgatttccttagtctcttcatccaacacgtattttgcattcgtccattcttcctcttgcagcataaaagcatcctcacttcctttactgcgtacttctatacccaaagctgagacattgaccacttcaccgatcataccattataataacggtgctcaccggatgaatcattcttcacaaacatgacttgggcaccacgtttcagttcaagcacttcatctgtgggataagaatattcaggaaactttccatctatctgggcacgaaaggtgaaggaacgaccgggtaattgtgccagttcatgttcattgatgcgttgcgcctgatagttatgggtagtcaactggatatatccttcctctttcgaagggttgaaattcggaatatacctacggttcaattcatccagcaaagttttatcacaacggttctcccgaatacggttcagcatatccagaaagtgagtatcactctgacgatacaccgttttcaattcaagcgtacaatattcagactgtctcagtgcacgactggaaaagaaataaggagtatcatagtagctgttcagcatctgccactcttcatcttttatcactggggcaagctgctgcaaatcgccaatcatcagcaattgcacaccaccgaaaggtttactgcgatcacgaaaacgtctcagcacatcgtctatcgcatccagaagatcagcacgcaccatactgatttcatcaatcaccagcaggtctatactacgcatgatgttgagtttatcttttccgaaacggaaacgatattgtgctttgccatccgcactgaatgaagtatcaggtacgtacggggcaaaaggtaactgaaagaaagagtgaatggttacgccgcctgcattgatagctgcaatacctgttggggcaagaacaaccatacgctttggactttcggacttcaaccgccgcaggaatgtagtttttccggtccctgccttaccggtcagaaagagatgtgtgcctgtattttctataaattgccacgctaatgccaattcaggattctgttccattatttcatcaatgttggttggaggtgtaaaggtagcacaaataaaagagctaaagcctccattggcacatctttttgcaaaaaaaaggaaaagctataagagtgacaagctacgagctacaagttacgagcggctacgctatgttccgaaggccactcgtaacttgtagctcgtagcttttagctttatcacttcagacttcctgctataatatccagcagttcatttgtaattgcctgttgtctgctcttgttatattgcttcgtcaaatcctgtatcagttcattcgcattatctgttgcagtctgcatggcaagtgtacgcgcagcatgttcagaagcattagaatcctgaagcacagtaaatagtttctgactcaacaccttcggcaataaatcagcaatcagctgtccgacggatggttctacaatataatcattctgaaaaccacgttttcccgatccttctgttgcagctgttgctgccaccttactcaaatcaataggaagatattcttcacgcatcaatatctgcgaacccattgatttaaagtgatgataaatcagttccacacggtcgatttgcttttccataaactcttgcatcaacaatgcagcaagttcatacgcttgcatatatgatggtttatccgccatcccttgataacttccctgcgatgtatagcccaactttttcactgcctgctctactttctttcctacaggatatatcagaatattctctttaccaagtgatttatattcttccagcgtttctccgagcttttttaccacattcgcattgaaagctccgcacagtgaactattggatgagaaaactacgaccgctacccgcgttacgggacgcacttcggtataaggcgactcaaatgtagcatctgtagacaagaagttagtcagaatttcattcagtttctgttggtaaggcagcatattctcaatccgtgtctgtgccttgtgcaacttagcggatgccaccatcttcatcgccgatgttatctgacgcgtactcttgacggagtttattctgttttttacttcttttaaagaacccatagcattttttttagtggtaagtgattaatgattagtgattagtggcaaatgaacgcatgccactaatcacttgtcactcaacgttaatcactactccaagtattgtttcgacatcatatctgctgtttcctctatcttcttgcagacttcatcgtcaatgacaccactcttcagtacatcgagcacatcagtgcggtggttcatttcaagcgcttcaagaaaactcctttcgaaatctgttactttatccaacggaacattacgcagtaagccatgtgtaccacaatacagaatggcaatctgcttttctaccggcatcggactgtattgcggctgaaccaataaacgggtattcttttgtcctttatcaatggtcaatgcagtaacagggtccatatcgccgctgaacttcgtaaatgcttccagctcgcgatactgtgcctggtctatcttcaatgtaccagccactttcttcatcgccttaatctgagcattaccacccacacgactcacagagatacccacattgatagccgggcggttaccttggttaaacaagtctgtatcaaggaaaatctgtccgtcagtgatagaaatcacatttgttgggatgtatgcagatacgtctcctgcctgtgtctcgataataggtagtgcagtcagcgaaccaccaccttttactttgcctttcagactttccggcaaatcattcatttcacgtgccacttcttcctgattgataatacgtgctgcacgttccagcaaacgggaatgcagatagaagatatcacccggataggcttcacgccctgaaggacgacgcaaaatcagtgatacctcacgataagctaccgcctgcttggaaaggtcatcataaaccaccagtgcatgacgaccggtatcacggaaatattcaccaatggcagcacctgcaaacggagcataatactgcaatgccgcaggatcacctgccgtagcggcaaccacaattgtataatccatcgcaccattctcacgcaaggtattcacaatagtagctacagtagaacctttctgccctatggctacataaatacaatatacaggatcgcctgcttcataattggcacgctggttgatgatcgtatcgatggcaatagctgtctttcccgtctgacggtcaccgataattaactcacgctgtccacgaccaataggtatcatggcatccacagcttttagtccagtctgtaacggctggttcactggctggcgaaagataacgcccggcgctttacgttccaaaggcatttcgcacagctctccaccaatgagtcccttaccatccagtggtgctcccaagggatcgataacacgtcccagcataccctctcccaccataatggaagcaattcgcttggtacgctttacgacgtagccttctttgattttatctgtagaacccagcaaaacagctcctacgttgtcctcttccagattcatcacaatcgccttgataccgttgtcaaactccaacagttcgtttgcttcagcattacgcaatccgtagatacgtgccacgccgtcactgacttgcagcaccgtaccgatttcatccaactgcacgcgggtatcaattccctctaactggtgacggagaatatcggagacttcgcttacttttatattttcagacatgtttctatttacgatttagttatttacaatttacgattgagattaccatcattaagtccgattcactacttacaatgtagagtaactctaatcgtaaatcgtaaatcgtccaatcgtaaatcacactattcttctgttcttatcaatgaactgttgtttcactctctttagttgcgtggcgatgctggcatccagccggaaatcgttgatatcaaatataaagcccccttcaatcgaaggatcaacttcagtttgtaactccatctgtgcatgtagcaaagtagaagcactatctcgaatgcgctcccaaacttcccggctcacaggtacagacgtaatcagctttcctacgccgatatgcttcaatttcctgtatagatcaagataagtcaggcagatgtactgcaaataatactcccggcggtttctcaacacaagtgttatgaagcgggagaattcccggctcacctctccattgcctacggcagcagtacaaatcagagcaaatttctccttgatcttcaaaatagggttatccaacgcctcccgtaaatcaggatgcttacggaagcttcgttccagcatacgcaattcatggtatacgcggtcttcagcccccgtaccttttgcgtattctatcaacgctttggcatatcgcatcgaaacaattcctatatccatttcctttaattattagtgattagcgactcatgaccaacatttcgctaatcattcatcactaatcgcttatcgctacttaattgcttcttgaggctgccagtacttcgtccagcatccggtctatcatctccatttgttcgtgctcttcatccagattcttgcggattactttctccgcaatatccacagaaagcacggcaacctggcgacggatatcgcgtatcgcctcttccttttcttgctgtatctgcttcttcacatcgtccagctctttctgcgcggcgacttccgcctgcttgcgtgcttcgacgataatcttgtcacgctcgtgcatcgcctcccgcaggatgcgtccttgctccttgttggcagcagcaaccaatgcttcgctctcagcttttaatctttgaagttgcgcattagcttcttttgccacttccagcgattggtctatgtaggttctacggccttctaccatcttagtaatgacaggaaagccatacttcgccaacaccacaaacaccacaccgaacgacaaaagcatccagaacagcagaccactatcgggtaataacaatgacataatcttaattataaattaataattataaattaaaagcaagtataggcctattataagaagaacactaacagacacacaactactgccaacagagcaacaccttcaatcaatgcagcagcgataatcatgttcatacgaatgtctcccgatgcttccggctggcgggcaatagcctccatagctgaaccaccaattttaccaatacccaaacctgcgccaataacggcaagtccggcgccgattgctgcacctaatttactaattccggctgcagccgcagtagcttgcaataatacagatagtaacataatcttttgtttttaaatggtttattattaattgttgttttctttcacttttacttctttatgctcttcctgagccagtccgatgaatacggcagacaacatagtgaatacgtacgcctggataaatgccaccaatagttccaatgcattcataaagatattgaacagcacagatgccacggtaagcgtaccattaagcgcaggtcccatactggcggaaataaagatcagacatgttaacaccaacattgccatgtgtccggccagcatattggcaaaaagacgaatcattaaggcaaatggtttggtgaagataccgaagaattcaataaatggcatcatcggtacaggaaccttcagccaccaaggcacatccggccaaaaaatatctttccaataggttttcgttccgaacaggttgacggcaacaaatgtaaaaagtgccagaaccatcgtaatagcaatattacccgtcacattagctccacccgggaaaatgggaatcaaccccatgatattatttataaagatgaagaagaacgctgtcagcaggtaaggagcaaacttccgatacttcggccctacacaactcttaatgatatcgtcgttcaccatcattataaacatctccataaatccgatgaagccgcccggagccgcactaccttgcggatgtttgcgataccactgggcaacggccagaataatgacaagtagcaatacgctgttaatcaacagtgacagtgtcacttttgtaatagaaatatcccagggacgtatttcgtttccggctgcatcatgctcaaccaacttaccttcgtacctgctacctgccggagctataaagaatccttcataggatcctccattttcttccaatcgtgaagagaggaaagtgtgccaaccagtctgcgagctatatacaataataggtaatgggatagtgacgtgcgtttttccccatgtggtaatatgccactcgtaagcatcgccaatgtgcccgaagacgatctctttcacatccaccgtgttttctttctgttcggtagaagtgacatcatcccgtttggctacgctgtcaagttccgcttcacccccctgtgccataacaggcaaggtagtaagcagcattcccagcatcaggaatattccggtcaatagattacgcatttgtttcatttttcttttcttttttctgtttctttcctacttcataagtaaaaaagaaccaagtctcatatatcagatagactatatagtaaaggatgaatgtcagcaggaataacttagcttcttcccgcactgcaaagcagtacaccaccaagagtatcacagagagcaacatcttcatcaccttcatcgccatgtagagcagcaacatcttttgcggggcatgcttacggcaagcatcaaacatagatatttcaaaaagcccgaacaagaagaaatataccggaatgaaaggatatcctccaaaataatgtccaggcaataaataatgtaaaatccctgcgcctacccatcctgctattaatgtcaacagggtgatctgatataaaaaattgcgctttgtcaagctgatactcatagtattatttaaaattaaaaatgaaagaattaaggatgaaaagactattgtcagtctacgcaggcagaaaccactccaccacttaactcaatgaaaccaccctctatgtcaagagtctgttcttctccttctgtcggtacatacatcaccttaccttcacgaagcgaagacacaatgggtgcatgttgcggaaggatggtaaacgttcctatcgtgccaggtagcgttacactttccacttctccattataaatttccttttcaggagacactatgttcaaatacaacttcttcatagcctctttccttcttttattttttaattatttacctgatccagcaatttctttcctttctctatcgcttcttcaatcgtaccgacattcaagaaagcaggttcgggtagatagtccacctcaccatccagaatcatcttaaagcctttgatagtgtcttctatgggcaccatcgttcccggtacacctgtaaattgttcggcaacggcaaaaggctgagataagaaacgttgcacgcgacgtgcacgattcaccaatgtacggtcggcatccgaaagttcttccataccaaggatagaaataatatcctgtaattccttgttacgttgcagaatttgtttcacccgttgcgccacttcataatgctcttctcccacaacatgcgggtcgaggatacgtgaagtagattccagcggatcaacggcaggataaatacctaactcagtaattttacggctcaataccgtcgtggcatccaggtgcgtgaatgtagtagcaggtgccgggtcagtcaagtcatcggcaggcacatatacagcctgtacagaggtgatagatccatttcgggtagaagtaatacgctcctgcatagcacccatttcagtagccagcgtcggttggtaacctacagccgaaggcatacgtcccaacaaagcggacacttcggaacctgcttgtgtgaaacggaaaatattatcaataaagaacaggatatcacgtgaaccaccagtttcagcaccttggtcacggaaagcttccgccaccgtcagcccggacaatgctactgattgacgcgcaccgggaggttcgttcatctggccgaatatcaaggatacctgtgatttctccacttcactgtaatctaccttagataaatcccagtttccttcttccatacttttcttgaactcttcaccataacgaataacaccggattcaatcatttcacgcagcaagtcgttaccttcacgggtacgctctcctactcctgcaaacacagaaaaaccatgttgtttcttagcaatgttattaatgagttcctggataagcactgttttacctacaccagcaccaccgaacaaaccgatcttaccacccttactgtaaggttccagcaagtcgataaccttgatacctgtatagagcacctcttgtacggtagtcaaatcttcaaacttaggaggatcacggtggatgggataagcaccggcacggtctaactctttcataccatcaatggaatcacccactacattcatcaaccgacctttaatctggtcgcccaccggcatggtaataggaccacctgtgggatacactttcatacctctttgtaaaccgtccgtactatccattgctacagttctcactgtattttcgccaatgtgttgctgcacttctacgattaatgtttttccgtttgatctttttatctccagtgcgtcgtggatacttggaagcatcagttcggcatccgtaccttcaaaatagacgtctactaccggtccgatgacctgagagatatgtccgataatttgtgacataagcaatctttttatataatttctctttttctaaactctacaagtcgcgttcttgtcattccgctgctatgagcttaacacctattgaatagtttttgttcaaagcttcaaatcttaatttttacggaatagttacataagcaactttgcaaatgtaaacacaaaaactttcaggttgtactctatgaaaacgtttttttctataaattatacccttttgaactattattactacaatcagaacaaaaaagcgacatccatttaacgttgcttaaacatttatcaacagatgcaaagaaggaattccactatttttgtatgaacaaaacatcatttggtaagttatattttgaagtataaatttaatgaaaggaaaaagtatgaattcacatcaaaatccattcgcaggaaacaccccacaggatgtaaccgaaagacaaggtgaaaatgccattttcatcgtttacggattaaatcaatctcctgatgccgtcgacaaagtaaaagatatatgtgccaatttctcagcgttaatacgtagtatgcgtaatcgttttcccgatgcacagttcagtagcacgataagtttcagtgctaatgtatgggatcgtattttccctggcagggggaaacccaaagaattggaaactttcaaagaaataaggggaagtaaatatacagcagtatccactcccggtgatatactgtttcatatccgggcacggcaaatggggctatgttacgaatttgcttctatcatcgacgaaaaactgaagggggctgtcgaagctattgatgaaactcacggtttcagatatatggatggtaaagcaatcattggcttcgtagatggaacagaatctccagccgtagacgagaatccttatcattttgccgtagttggtgaagaagatccggattttgcgggtggaagttatgtatttgtacagaagtatattcacgatatgaatgcttggaatgcgcttccggtagaagagcaagaaaaggtgataggacgaagaaagttcaatgatgtggaattgtcggatgaagaaaagcctgcaaatgcacataatgctgtaacaaatattggagataatttaaaaatagtacgtgccaatatgccatttgccaatacttcaaaaggagaatacggtacttatttcattggatatgcaagtacattcagtactacgcgccagatgttggaaagtatgtttatcgggaatcctgtaggcaacaccgaccgcttgcttgattttagtactgcggttaccggaaccctgttctttgcaccgtcttacgatctacttggagaagattagcagttcgcccccatgctgggcaaacataaaaaaaggctatctatcccagacagccaatcttttgttaaccttaaatctaatactatgaaaaacacattgcaaaggtacggcttttcttgatttctccaaatttcagagcctttacagggcattttacaacaaggtttaataattctatcgaccttgttaacaatttgacaaagaaaagagagtttacactatatttttaaacaggaattaagaagataccggatttccagagaagaatatctattcaactatagtgggcctctgcatataatatgcagaagtcccgttatgataatagttctcttttatggaagtacatttaaaaccatttttttcatataaatgaatagccggggaattagaaacattcacctccaaagtaattctctttaagccttgtttttgggcaataacagctatctgatctattagtaattgccccactttcttgccacgaaaatcaggatgaacagctatcgaatagatacgtagactacaagcacgttgatttatcaacacactaaaatagccccccaccctttgctgatattctgctacacaaaagtatccttttgcttgagaaataagataaacaaactgacgtttagaaaaactatctttatcaaaacaaatttgttctatctccattattgacggaatatcatcaatttcagccaaacgaagtataaatcgctgttccatacgaattagaaacgttttacatccaacatacgccaaaagttattcagcaaccgatagtagagttcgtctcccagaatggcatcttctaacccatggtcaatgctgggattatcatttatctcaataacaatagcacggtcatttaccattttcaaatctactccatacaggcctttcccaataaaagaagccgcgcgcagcgctgtatccaataccttacgtggcacttgataaataggaatagtctccaccagtccgcaacggctccgtccggaagaataatggcaatagatttgccaatgtcccttagccatataatacttacacgcatagagaggctctccattcaaaatgccgatacgccagtcaaaatctgttggagcgaactcctgagccagcagtatagatgacttatcaaacaatactttcaacgcttcatccaactcgatctcattattgactttcttcataccgatagagaaagaaccatctgggattttcaggataaaaggactaccaagttgttccgtaatctcctcataagagttgacattcgatttgaatagtaacatggaaagcggtgccggaatcttttccttctcaaacaattctttcagataaaccttattggtacagcggataatagattgaggatcatctataacagccaacccattttgtgtggccaattgtgaaagccggaacgtgtaatggtttaacgaagtagtggtacgaataaataaggcatcaaactccatcagtcgtgtggcatcttcttcagttagcaattcggcatgaatatccatcttcttagccagttcaagtagtttgtgaagtgcctttttatcgcttggcggaaatttctcatccggatcatacagtatagccaggttgtatcttgccgatttcgaggcctgaggattgcgccacacttttctgttaaacaaatccagagcattagcgaaataatcctcttcctcattattcaatgagctcaaaggtaaaaactgaatattttctatctgattcttatgtcgcgtatttaatgtaacccgcaataaaggagccggataattctcaaaaataaaacgggctatacgctccaatcctttctctttgcaagtgccaaagtatacattcagagaccaaagatcatcggttatttcatttttctgaatccattgataacaaagcttttgaagactgctatccatacggatacctgcccctgcttccaccttattaattatatctactccgggaataactttatgccccctcgtctgggctaataacgagcaataatagccttcggagttatagctataatcattactcaggttgattactaatttacgatcctttcccggtgatttatacttcaggtagtcagatactgttaaaatgctgtttgttttggaatatggtttccaatcatccaagctgtctacaaggatcaatacattgttcatttcgtctttttaaaaaagtgcccgaaagtagtgaattaaataatacaaaatatcgcagactcaataattattttcaagagatgaaaacaactctgtttttgcaataaacaaaagcctcccagggttgtttctaatagcaactaaaaacagaccttgattatgaaaaagtttaatttcagtttattggcaggcttgttgttgctgatatctgcttccgtatgcgcagaaaatactccggaaaaagtacaggaaactttcaaaaagatgtatcctaaagtgacgaccgtggaatggatgcataaaagtgattaccacattgccggattcgtttcagatagccacgaaatgaacgcctggttcggaaacaatgcccaatggataatgacggagacaaacgtcgaaagcctggaagatgtccctgctcccgtagctaaagcatttatgcagacagagacccctcctatacaaatcagatatataaagataattaccttccccaaaatgcctactgtagtaatcatcgatatagaagagtataactctgacagagaaattcagcttttctatgctcctgacggtaaactactacagagcctcgatgtatccggtggtgatggagaaatctatcccgagttattcgggtaatacaaaattcttaccaaatataagaacaattgagcaaaacagaatgttatctataaaaacaactataaatagcaagacttatgagtagacgttcacagctggagcatgaagtatcattagctcaaaaacgtattaaggaagctccccaaaatacgccggcaaacatcagaaaaatttgggaacaagagttggttgaacttgaagtagagctgaacaacctgactgacgacgaagaagataataacgattagcaacctctgacaatgaaatgggataatcaactgataaatcatttgcaatggtcgaatgcgatcattaatcgtaagagcaaagaaatcgtagcacaggaaattgctgcaatggcgaaggatggtgatgtgatcggagccggttccggttctaccgtttatctgacgctattcgcattagcggaacgtattcgcaaagaatctctacacatagaagttatccctgcctctgcagaaatttccatgacctgcatacaattgggtataccacaaacgaccctttggaataagcgtccagattgggtttttgatggtgctgatgaagtagatccggagaaaagtctgattaagggacgtggtggagccatgttcaaagaaaaacttctgataaaaagcagtagtaagagcttcattatcattgatgatacaaaactggtagatcatttgggaagtcattttccaatacctgtagaagtgtttccaggtgcattaacttttgtagaaagcgaaatgcaacggctaggagcttctgacgtgaaattgcgtcttgccggtggaaaagacggacctgttctcaccgaaaacggcaactttatttttgatacccgcttcagttatgttgacccttctttggaacaaaacctgaaagcaattaccggagtaattgaaagcgggctttttatcggatatgatgttgaaatagtagttgcgaaataaaaaagcagctgcactcaatctgtggcaactgcttttcttttatctaataagtaagccttaatacacttcaaccttttctgctattcgcttagctttatctctcaatgcatccagatctgaatttaacggtgcatagcataacaccactcccatacgacgattgacacgtgtcgtcggcttaccgaaaatgcggagataagtatcttcttctttcgtcacctcttcaataccgcgataatcaggacgttcctggctggcaatagttgaaagaatcacagcactggcaccaatacgctcctgtttgatgtttggaataggcaagcctagtacagcacgcaaatgaagttcaaattcattcaaattttgtgttcctgccaatgtcaccatacccgtatcatgcggacgcggagaaagttccgagaaataaactccattttcatggctcaagaaaaattcaactccccacaggccggcaccggtcagagcccgtgtcactttctcagccatttcctgcgcttccttcaaatgagccggatcaatgtgcgccggctgaaaactttcacgataatctccccctttctgcacatgtccgatgggcggacaaaacaaggtaggcccattcttttgcgtcaccgtaagcaatgttatctcactatcaaacttgataaattcttcaataatcaattcttttatatcaccacggctaccattgcagccatattcccaggcatgttccaattcatccgcactcttcacaagagactgccctttgcccgaagaagacatcagcggcttcactacgcaaggaaaaccgatcttttcagaagcagctttcaactcatccagagtttttgcataaaaatatttagcagttttcagtcccaactcctgtgcggccaaatcacgaatagccttgcggttcatagtaaagtttacggcacgggcactgggtaccacctgaataccttccttctcaaaatcgtaaaggcgttctgtacggatggcctcgatttccggaacaatgatatccggctggtgtttgcgtactacacgttccaatgcatcgccgtcaagcatgctaaatacctcatattcatcagccacctgcatggcaggtgctccggcatatgaatcacaggcaataatatattgaccttttcgttgggcagaaatcacaaactctttacccagttcaccggaacctaacaataaaatcttcttcatttttgctatgtgtttatattaagaagcacaaatgtacataaaaaaataagtagctaccgctttaaataatttaaaaaacgaatggatagctcatttttatctgtatctttgtagcataaacaatagggtttattctgaaatcttctttgtgcatgtttgcttttgcggtattccgcaaattattccatcccaaaatgacctcataatcagctcctttgttcatcacaagattaaattgttgtatggatcctgaacggattaggtgcagccattagtcagaaaaactaagtgcagtatataaactgcataatatataataattaaagaatggcagtaaaaagagtaacatcaagtaaaagagacagagaaaaagcgaaacagagtaagcgagaagaaaaacaaaagagaaaagaagaacgcttgagcagcggtagccgtagcttcgaagagatgctggcttatgtggacgaaaacggtattcttcactccacaccagaaggtgtaaagcctaaagaagaaatagatgcttctgaaatagaaatatcaattccgaaaaaaggcgaagcagaagaagttctgccattaaacggacgtattgaacattttaatgtgtccagaggttatggttttattaaagatttaggaagtggtgagaaatattttttccacgttacttccgctcccgaagggataaccgaaggggataacgtaacatttgaaattgaacgtggtacgcgaggtatgaacgccgtgcggatctcaatcattaataaataacaattttaacttacaaaaagaaatgaacatttatgttgcaaacctaagctggaacacaaacagtgacagcttacaggaattattttcacagtatggcgaagtaacttcagcctacattattaacgacagagagacgggacgttcacgcggtttcggcttcgtagaaatgccgaatgatgaagaaggtcagaaggctattgacgctcttaacgaaacagaattcgaaggcaagaacatcgctattagcgtagctcgccccagaacagaaagacctgcaggtggcaaccgtggtggtggctatggcggtggcaaccgtggtggtggctatggcggcggcaatcgtggcggtggctacggcggcggcaatcgtggcggtggctatggcggcggagatcgcggtggaagatattaatcttacaacttaacaaagaaatgaaaactgttcgggatgatttccgaacagtttttttatgtccctgtttcacttattatatatcaataatatctatatttgcatatatgataacgagcaaacatattctactgacactttcactgctactgtgcaatgtttgtatctacgctgctgcggtcaactactccgtacgcggaaaagttattgataaacaatcacgccaaccggtggcttatgccaacgttgtggttgcaggtattcccggtaaaggagcatcgacagattctctaggcatatttcgtatagagcagataccccctggcatttatcgcttcgaagcaacactgataggttataaaagcgcagtgacctccgagtatttggtttccgcctctacgcctttcattgagatagagatagaagaagatgaaaatatgctatcagcaatagtggtcaccccctctcctttccggaaaacggtagaaagtccggtaagtatgaggattatcggcttgcaggagatagaaaaaagtccgggaggaaaccgcgatatctcacgcatcgtgcgagcctatccgggtgtctctttctctcccatcggttatagaaacgacttgatagtacgaggcggatcaccttccgagaatcacttctatatggatggaatagaaattcctaatatcaatcactttgccacacagggagcatcgggtggcccggtcagtatagtcaatgcagatttgatacgggaaatcagcttctacaccggagcatttccggccaatcgttccggagccatgagttcagtattagattttcgtctgcgcgatggcaacccggacaaacagacatttaaggcaaccctgggagcatccgaagtttctttcagcggtaacggacatttgagcgataagacaacctatctgttttctatacgtcaatcttatctgcaactactgttcaaggctttaggacttccctttctgccaaacttcattgacggtcaattcaaattgaagaccaaactatcagcacatgatgaactgatcctacttggcttagtcggcattgataagatgaaactgaatacagacgagaaaggagaagacgcggaatacatattaagttatctgcctaccattcaccaggagacattcacagtgggagcttcataccgccattatgcagggaaacacgtacaatcggtcaccttaagccataactacctgaacaatcgtaatataaaatatctgaataatgatgaatcttccgaagacaatctgacactccggcttcgttcagtagagcaaaagaccaccctgcgctttgaaaaccaaacgagattagggcaatggacattgaaggaaggtgcagaaatgaattattccaactatacgaatcaaacgaatcagcgaatattcggtataacctctacactctctgattaccggacggatttgaacatattcagttggggtggtttcttctcaacagattataccaccgccaataaacgtttttccgcatccgcaggcatccgtacagatggtaacaactacaataaggagatgaaagaattatggaaacagctctctccccgcctctccttatcttacgaactaacccagcaatggacattaagcggaaatgcaggtctatattaccagctaccaccttatacagcattaggttttaaggacaacgacggtctttatgcaaataagaatttaaagtatatgcaagtgatggaaaccagcctcggacttgattggcatttacaggatagattgatgatttcggcagaaggtttctttaagcgatacagccgtatgcctctttctctccgtgacgacatccctctggcatgtaagggagacgattatggcacagtaggcaatgaggcattgataccgactgcacaagggcgtgcttatggtgtagaaaccatgttgcgttggcagataccggagcgcttcaactttgtatcttcccttactgtcttccgcagtgaatataacagcattgcttctgcttgggacaaccgtttcattcttaatgtaagtggtacgtacaacctgccacgccgttggagtatcggaggaaaattaagttatataggtggtgctccttacactccatacgatgaagagaaatcatcattggttgaagcctggaatgcacaggggcgtccgtattatgattactcaaagtacaatacggagcgtctacccaatttcgcccaactcgatattcgtgtagataagtctttctattttcatcgctgcatggtaggtttttatctcgatttgcagaatatcacaggaagtaagttgaagcagcaggatgtgattatgagtacaggagttattgaaaacccgtctgcgcctgtaggagaacaaagatacaagatgaaatatctgaaacaggaaagtggaacgatattgccgtcgattggggtgactgtggaattttaatgtcacatattttgttgatctacaaaaaataaatagccggaatgatttatttaagatcattccggctattataataaaaccataattaggttaaaaagctacctcttacaacatctttttatctgttccacgatataggctacatctccatccgtcacccaaggaccggcaggaatacacaaaaccatattaaacaaacgttcggaaacaccattcacataacaaggattcgtagcataaacgggctgaagatgcataggtttccacaagggacgggtcttactaccacgtcctcttccggcgcaggagcctcaccaggctgcggcgaggaggatgcgagggattggggagtgccgtcgaaatcatccttatcacgtgtatggcccttttcggccgcccgtttattgttacggatacccttttggctcttagcaccgtaaaggtgcttgttacggactttcagcctctcctccaatgctgttattttagacaacagattactgttcacctgtttataatcgtcacgctcttttttctgcagccatagcagccttctgcaaagacaacagttcatcaaccttggacaacagttcatctatgcgggcctcgtcacgttggatgcgttcagcgtcccgctcacaggcagccatcagcgctattatcattttcgatttttcgttaggagtcatatctgaatatggtttttcaaaagggacgaaagtctcctcacgttccttcagcttccttgcggaagaaagcagtttcattctttcaagctcattcatattcagtatcttacttgcttcaaaggtacaaaaaacaatgcaacgaaagagtgatttcacctcttttttattgctatttgtttaatcctcaagtttttatcaacaggagattctaacaagagaatgacatcacgccaattgattaaatgaatcttttcatcaccactataggctacatgcataaacttgtatccgggcctgaaacgtttctcaaacatgctgtaagacctttgatcataactaaacaagcaaaccagacgtaaatctttaaacatcacgataaagacatcaccgtcttccggttcacgattcaactgttgatgaattatggataaaaccttatcatatttacagcgcatatcatggaaatcgcggacaaagaaaaagtggttgaggccggttatattcaacataagccctccaatttctctactaagcttttcaaatcttcgtagctcaaattcttttaactgatatgaagctcatgcggatatccaccaagattctaagttcggtaggagaaagaagccgagtatccacttccggattgcgttccggaagtggtgaaagcttttcctgaatttctgattccggggagggaccaccaaaacctgaacaggaattatctgctttcgggtatccttgtaccatttggcaaacaggttataagggactttgttagacagacagaattgctctatcgaaacaccagaagggacgccttccaatttatagcgcacaaaaagacgctctaaatcattgtaactatacataaactttgctgttgatttaatgatagcaaaggtctggctgttattgcatttatcctacacggcatttttggacgctaacctgtgataatttgaaaatgcctacttacacttcatatcagcggtttttctttccccattgaggccaaagcaaatatttgcagaattgccatacggcttttaaacacttcatctttaaacttcttttttgagtaagcgaagtgcctcttttgcatcctctatgcttatctgcatattgcgagctatatattcgggagtgaatatttgcatagagcaggagcactgctccatctcaatgaaatccttcactctgatcagaaattcttctgttatactcttatctgtattcatttatcaaatttatctggttattttaaataatgtaagaaatatcaacttaaaatattcaaataacgaggggttattgatgtatctcatattaagttctatcttggctggcatgatttccttaatataagtcttgtctggatctgacgacttttcaagcaagacattttcgtccatatattcaatagaagcatagtcggtaataccaggacgaactttcaacaccttcatttgatcttcggtatataaatctacatacttacgaacctctggacggggaccaactatactcatgtcaccaataaacacgttgatgagctgagccaattcatccaatttgtatttgcggatataataacccgaacgagtaacacgaggatcacgaccacctacagtaattagactgcctttatcagcatgtatcaccatagatcgaaacttaaagattcggaaatcttttccgttcttacctacacgaacctgacgatagaatacagggcctttggaatccaactttatccatatagcaaggatgaggaatatcggagataacaccaataatccacatccagatgctataatatcgataattcttttcatcaatcaagttttgagacaatatcaacgaagttctcgatgacgtaatctacatcctcatcactcatttttgtgttcaaaggaagagtcaactcatttacgaacatgttatagacatttggataatccttaatgtcaaatccaagcgccttgtatgcagtcatcattggcaatggcttgtagtgaacattcgtagcaatgccacgttccgccatttgctcaattacatgattggtttcctcacgagtcttgccaagcagacgaaccatataaaggtgaccactaccagcatgatcttctccatagtgatcaagcaccgctatattcagattggcaaatgcagcattcattctctctatcattgcacgacgacgagccaacatctttggatagcgttcaaactgaaccaatccaagtgctgccataatatcggtcatgttacacttgtaccatggaccaataatatcgtattcccaagcaccaagttttgttttggcaagtgcatccttgttctgaccatgcagactaaacaactggctcaaacgatacaagaattcattccaagtctcgccctcaataaatggcacaggacttccacagtaaacctgctgtcgctccaccttttcgttaccgaaaggaagattccaagtgatagcaccaccttcagccgtagtaaagttcttcactgcatggaaagagaaagaactgaaatcggcaatctctccagccatcttaccatgccactggctaccgaaagcatgagcgcagtcagcactaacagctatacgacctaatttagcttgaatatcgctcgaaggcttatacaaagcctttatctctggacgatttacgatttcgaacaccttatcataatcgcagacgatacctgctaaatctacaggcaccaccacctttgttttttcagtgattgctgaagccagtttttcatagtccatttccagacaatcagtctgcacatccaccatcttgatggtagctcctacgtgggcaacgacagaagcagaggctgtatatgtataagctggcattattacctcatcacctgaacctacaccaagcaagtgaagtaccatttccatagctgctgttgccgagttcaagcaaacggccttttctgtatgaacatagtcagaaataatcttttctaatttcttagtacgaggacctgtagtaatccaacctgagagtattgcatcacgcacttcgtttgcttcttcctcagtcatgtcaggaggactgaaaggcacatttcttaatttcattgtcataatattatctatttcaataaaaacacatattataatgttggtatcaataaatagctccatatttgggtcatgaaagaatcctaaagactttctttaaattgcgcccaaagccatacccaatccaccttgtttttttaaattgcccaatcaagaatccaagcagactctaatctacagaagcaaaatgttctgcattattgtgcagaagataaaaagataaagtcttgaagacgagaaatatacattatcccagtatggaataggattaatacagtgcttcagtatttttctatctgaactgaagatttatgtacttttgcattgagaaaagaatgatgacattctaccattaccttgcataggtaaaatatcgaatgcttgtaataattgagcaaggcggaacaacgtattttcgtaactcaaatacatctgtttcagaaaatgcacctgacagaaaaactttagcattactggtttctctggcatcatctcatgcggcaatttcaccacaccatcaaatttccaagaggctttgttctgcagcaaacaggagaaactctttccagtcaacataagcaagcgcagatgtatcactatcatgatctaaagacaagcgcaccagttgctgcaaaatcgtgtacttttcgttcgttaccatttatttaattttttcctttaccacgctctttatcacttccacatatttagccgttcccacttctcgtgtcaaattcttcattataaaaagacgaccattctttcccatctctgaggctaatgaccgattattatacaaagcaaggatagactctttgaaggccacaatatcccctgctttggtaaagatgccacaattattgtcttcgatgattgtctttaattcattctcatcaaaattcgcaagaacaggacgtgaagcagacataatactccaagtttttgatggtactgaatttgcacctacgccaagtttagaaatgactaatgaagcatcacctaaagaaaacacatacgaaatatcctcatatggttggaatggaattagatgaacattatccaactttttgtctaatactattttctctacatgtgacttataagcgccctcacctaccaatataaaattaatatctctatagttagaattattaaaatcttcggccacttgcagaagcatatccatattctgcgtcaatcctatattaccattataagtaacataaaacttactacgatctaatccgtacttatcgaacaatttgttttgcactcttggcacatctaccacagcattctgatctacccaattgtaagccactacaatcttctcctcctgaactccctttgccatgatattattcttaaaatcctcactgattactataatcttgtcagcttggttataagtaaaattttcaattatacgtccaattatccaaaaaatcccacctttcttaccaagccctgtaccaaccaaagagtcagggaagatatcctgaagattgtatacgaatggaatgcccctgagcttcttaatcatagcacccatcatgcctataataggaggagtacttgccataaacagcacactcgcatccttgctacacatacacttgctaaactgaataccacaactcaggaaatatcgcacagctcgtgcaaagggattcttaccttctccatagagcgagaagcgtttgataaccagatgtccgccatacaaaacttccgttgcatgatttttcttatagtacgcacgtacttccttagcaactccacgcgtaggagtaggcacataaaccacacaatccattcctgcctttgcaaaatcttcatgcagattcttccaaaggtacgaactagctgcttgttccggagcaaaatatgcgtatggtgctattatcttcatacttataaagtcttaatcaacctatacattttacggttcggataggctacaaactcatatagtgtttcatatcccattgagtaatagaaacccactgcactctcattgttattgtaatcggtggtaagcgacacacgttctacaccatctttcttcattatgctttctgtctcagtaagaagcttctttccaataccttttccttgttgaccatgattcacaccgattgaatagagctctgcatattcctcatcatctactactgtgtctcccgtcttcgtcaggttcttcaccaatcgaagaaacgctccgggattagtaaatagcaatttcaatgacagcaatgcgaaaattacaaagttttgttttataagtcggctattgaatcccttgcacactttcgtagcagctgagaatcccaccaccttgccctcttctacagccacacaggacacggtttcgttactcttcacaaaacagccatagtaaaacttcaggaacgattctcccaaactcgtcaggaagaaacccttaaatgcacttatatgtatatttacgatgtcatttacatcagaagatttagcttttcttatttgcattttataattccgtaacaaattcttttagtactttttcaaactcaacctagtcctttaagaaagtcctcaatagattattacacctttgggcatatgccatatactctgtctgtaaggaatgaaagcttttgataatccatcaacaccttgatgcttaggtgggataactggatatgttttcttaaacttgatgagccaatcataatctattgcttcatccgtacaatactttcgaaggcttctgccattacgatgctgattataatcctgcatcactttttcaaaatattcctttgcgtccatctttattaaaatttgatggacgcaaaaataaatcgtgactttgctaaataaatacgctcatatggtggtttacctcccatttaaaaccgacatcgtcaatagttgccactaccttcaagtaatcatcaataccgcaagcacgttatatcaactgagggaatgctacgtctgccatagttgtatcatttgtaaggttgattccgcaagggtaacttcagcttaacaattttcattctctaaggcaagtttgttttatttcatgggtatttctcaactttttgtaacatcaagaaaaatggactgtattgtactttcaaagttttcgtcattgtatctcaagacatcaattcctttcatttcatactcatcagcaagagtactatcataggaaattattaaatctaccttaggatattcgaatttagagagtattataatactaggatactcactttcttttttctgataataaactaaatcatccataggatgtggctttaaaagcaaattaatctgattatttgcgatttgagatataattttatcttgtttgtcttcaaataacgtagaacaaataattaaaacatcacgtttgccattacaaatcattttatcactttttgtaaaatcaaacaatttcaaatattttgctattggtttatttttatcaaaagacaaccgctcacatgcctctctttgttcctcattaagataatatgcctcattaatattattacatcttatataatggaatgtcaagtcaattttaccatgttgcacccaaatagtatataaattaatagaatttgccatataaacccatctatcacttattcctgtatagaaaatagaattcgaagagtcaagattagacaaatagtaaaaagccagaaaataatcaaaagatgaataatatctaaagaaactacatgattttgaatattttttatgcataaacatcatcagttctatggaatagatgaatgaaagtacaaattgtttatatcgaattcctgaaaatacagaaacggattctattgatttatattttttcgatgactgtcctggtatatcaaccattacaatattttcaattttagtcttcttcaataaattaataaatctctgctcagtcatccctatattaatagaaacactcttttcttttaatgaataaggttttgttattaaaaacttgatatgatagactaaaaatcgaaaaattactaaaatgatagaaattattagttcatacctccttataatattaagcaaaacaagagttttattctctttaatattataatgggtttttaagaacagcacagccatactatattgatattccataaatgaattataatgaaggttttctttcttcattaagaatttggaaaccgagacccaatttataaaaccgtataaaaacgccttaaataattcctttttctttaacttttgcatatattacattacaattattactacctcataacagatctatcaacattctgatacgtcttatcaaacattaaacttagtataattaatcccctgtttaaagagagaattcgtttatcgaaatttatccatctccaattttttaaaggaaccataacttctcacattcccaattacttgttatttacgcgaattgtatagctcggcacaatataactttaaattttcccagttaaaaaagttatattctaactcttaccttataagtttatagaacagacattaaccaattctacatctatcttttctcggtaaagatttgacaaggcattgcctaaataaatacattactctaatgatataatacaatataattgggaaaaaaataatattgtatagcatataaaatatcgatgatattgactgcatcatcaagaaaataaagatggataaagtagcaaatgaaatattactcttattataagttttcctttttacgtaaatgaaaaatatcaaatcaattagtaatgtaagtagataaccgaaattatttaccattcgacacgtatatccgtgaaaagccgcctttccattataatccccaataccagaaagattgtatgctttataagctttatcttcgtatgtgtcagaatcccaattcataatatgaaaaaaagacaataactgatatagattatacagagcctgttcaccttttaaattatactctgaattatatcgttctaactgatttattccattaacatatccttgtgaagcatagtcaaccaaactaaacaatataggatcctttatataggaattttgaggtatacggtctccatagtagtccatttttgatgaagaaaatctggatattgtaccaaaaattaaaacacatcctaaaatacaaatgccatatttaatatatttctcaaatttcaaaaacaaattagaatcaatcatacctttgagataatataaagaacagaacataatcagcgtatagtttaaaatagaagctctggaatacatggctaatccagcaacaagagaagatgctgataggattaaagacttgagcgcttttttattttcgtgattctgtaaatgaagaaatacaaaaggcaaggacaagtatcctaaagcttgaacaactgaaataaaacgaaaaagaataccaaaaaaaggcacagtttcatataaatccttgtaaccgccttccaattttaattctgctatatcaggtaaatacatacgtacaattacaaaaacaattatacttgccactaatagcaataccaatattctatttagattcttttcgtaataagataagaaactaaaattttttataacaattttcgatacttttccataagaccaagcatatataataagaaacagattagtattcacaaatataacattaaaaagagttagcatagtgtcaaagcgtatagtattacctactaaaaaatgggaaaaatagcatacagcttgcattatgattaaaatcctataagtcttattgttagcaggaagcaaaagcaataaggaaaagaacaaaaattcaattataataattaacatacaattttacaaaacaaatttgatattcaataatctaatttcctaattattgagcattaaattttcttaaaagcactcatcacatagtcaaaatatttccacagcaaaatacaagatataaatataaagactaaaatcctaacaaataagccataagttcccaagtctaaaatatagtatatcaaatagataaaagtcaaaactactaatggaaaaacaaacagcctcacgttcggcacatattgcttcaaaataaaccggtttatcaaatatgaaacaaccattaaaacaaaatatgacacgcaaaatgctactgcgattccaagtccttggaatcgctccaccaaaagaaaactcaaagcaatattgctcgaaccactaatcataatagaaactgcattccatattgtcctttttgcaaatcctgttgaacgtaaataaacatatgcccactgataaaaaacgtatccaagcacaataagtggtaacatgtacatccctgacagatattctacctgtgaggaaagaatgcatgcaatatccttaccaaatattgataaacctgctgcaccgaccaatgtgattcgccaaataagatcataatctttatcaatactgctatatttcttatcagtcatatactgtaaataatagggattccaggcactatgaaaaagcgatataagaatcatcataatcattccaatattcgctacaaaactatataaacctgctgcatcaaaaccggcataattgctcataaagatacgcccaaactgagcgaggatgataccgctcaatgtatatggaatataaggtaaagaatagttaagtaagtattttacatgttctttcttgattttagcctttacataaaatggttttatctggcgtataagataagttgaaagaatgatcattgccataatagttccaaacacatagccataatacttgtcactatccaaacatagcataaataggactgataatccgaaagctaaatatgtttgaacagaagaaacaatcgcaatttttcggctctgtaacaatggctgatatatttgtgtgaatattgaattaatcacactatatgaggccacaggaatcaggcaaagtgtcaaagttttactaaacatcaatttatctgccaaccaaggtgttatggcaataattatcaaggacattattagccagacatttgatgaaatcttaatcgatattgtacaaaagtctttaaagtcctgctcattccttgcgtcatagaaataacgagatacagcgacctctgtgttcaatgtcaacaatacttgtactatgcccacggtagaaaggaatacgctcatcactccgtactcatatactgaaagtagcttggtatataacggtatcgatataaatgcaagtgccttttgtgcgatagtggcaaagaaataatttgtactatgctttgctaatgctttaaaatcagacattctttaagcttgatagtatgagtttaattctattaaaaacttctatgtgtccatctttatttagatgatgaaaatcagtttgtatgccgtttaatggaaaatccatcatatcaatataaactgaatactctttgctctttaatatagaattatactctgatatatttttatgaatacctggtgcaatagattcatatatgtcactagctcttattattccaatagtaataataattgagttcggaaatttttcatgaagtatgtctaactgtttactaaacttagccttagatgtataagtaacatttcgatatttacgcaaataatagaaaacttttttgggaattaatcgtattaatcttgttttctttaaaagaaaaagttcatatttgctaaacgcacgaggagcagaatcaacaattccactttgcaaaataattatctttggaaaaaaagctcgatagtattcagattgcttaactaacatatctattgtacctccgcctaatgataaacgaacaacatcaaaaccataacgctgcaataaataaggatagctgtcctcaaacaaaacagattgagggtataatcttggcaatcctaaagaatcagttattaataaaatcttattcatctaacctttttatgtgaaattatatcttacaacctccgtttttatatatagcaaaaaaactatttatatataagtttgcttatttagaacagtaataatactttaaaataaattcttcaacctattcttgcaacaaaacctataattaattattagctaccatttttttatatgcattttcaacatgcttctcctgctgttctatagaacaaagccgactcgtattgccttctataaatagcttcgtttctagaaaaaaaccaggtttaaactctttatctaaaccatcttctaactcaacgtcactaagtgcaacacttccaatattttgaatttgaagtttctccataggacgaaggtaaagtctatgttttgaagtaagtatctctaccccccatcgacctggagaagcccaatttgcttgataggagaaaagagctccattgactgtcacaccagaccctgcaaatactgctggtttatgccagatgagctcacctgctgtaaaacaagccatatcctttggttgccctccaagaaaaaaagctaaatccactacatgagaagagtttgcataaaaccaattttctaaatcatgttttggcttgtccattttttctattacgtgcccccattcagtaaattcaaaactaaaagactttactcctccatcttcagctattatcttttctgcagctaatgtgcttgcaaggcagcgacgattatatgccaaaaaaactctcgcattgttttgctttgcaaactcaattactgaaggcaactctgtgggattacagaatcccggtttttcaactaggatatctttaattccataagaaataagtaattttgttacattagcaagttctattagatttactgcaacaatagctttttcaggttgagttggattattagcaagatatttatctgtacctccagaaatgacatctacagctcccaattctttaagcgtatctgcatttctaccactacgtccaactacaataaattcttttcctaaattcttaagaactttagcatattcttgggctattacgccagtaccaattatccaaatcataatgttattatgttatagggcaactatcatgctctgctccggttgcctgattatataaattaagtatcccttttaaatatgttttatgaaactctgcagattctaaatatgttgctaatgcacaactagattgctctatcagtgaatcaacaaccaagccagaaagttgactttgatatctcactgaaattgcttcttcagaaccattaattttcatcacctgccttgcttcaaataattcaatatttaaagaaccgttagtaatcttaataacattttcaacattggtttctggtaagcatgttaatgagagtgtatttccattaggcgtcaagaatttctcagtcccataaaattcaacatatccagccctcttactttctatcacttttggttctacggatgaaaaatctatttcaaaagatttttctccacataatttcatgaaaatatcgacaaaatgaattgtattgcagcacataccccaatccttgccatagaaattcatattaattaatgaattcttattcagcaaatcatttattttgtcataatagccaaacattcgacgagggcaattcacccaaacttttacgcccttctctttaaaaagtttatccgcttcatcatattctgaaagcgaagtaaaaaggaatttttcaagcactaaaaactttataacagaatgcgctaaaagcaacttgcaaatagcgagacgaggttttgaactacaagccactattgctatatcaaaatgcaaaggcaacaagttagtttcacttacaaaatgcaccgttttggatacatttgtctctacttgattatagcgttcttcagctacttttaaagattctttactcaagtcatacacccagatatccaattcttttgaagaagtcttaacgccttgtaaatggcgacttcctagttggcctgcacctgctattaaaactgtatacataactatgtattactttatatgtttaaccaaatcttttgctttttgatattcttgaggattaccaatatctatccaagtactattcaaagggaatcgaacaaccttatatccttggtccaataacaattccatgaagtctgtggcattaaagaaagtatctttaggaataagattaagaagattacgctttattaaatatattccggcattagcgtaataattataagttggcttttcaagtacacctttaacgtttcgaccttctaactcaaatattccatatggaaccgagatagtatacggcacagcagctatactcatatctgcatcatattctttaaaatgtaagaagaaatcttcataatctatattagtaaaaagatcgctattcatcaagagtatggtatcattatagaactcctctacatacttaatacttcctatagtaccaagaaacttcggttcgcggacagtttgtattttaatcccatccttgggttctttgaaatgatcctcaatttgttctttcaaatagtttacagttactgataggtgacgcactccataactaatcaatcgatcaatattgtaatcaataatagctttatcgccaactttcaacaaaggttttggagttttctctgtaagaggacgaagacgttcgcctttacctcctgccattaatactgcatctataggaagataagatttatttttctttaagtttacgatgtcaactatctgcatttgttcattaacgacaggcaaaagttcaatacccttttcctttgcactatgaatttgccttacatcgaaacattcagctttaagataagtaaaattacgattagccactaatcctacattcgtatcaagttttgccccttcaattaagcatcttctgatatctccatctgtaagtgttccaataactgaattattatcattgaaaacaaacaatgtaaatgcatcattccgtcctaattgatttatagttttcattgcacttaacaaattatcggactcatatgccagatgattttccatcataatctcaattccttaactattaaaaaaattatttcataaaatcaagcttattattttccaatagaaacgagataatctcaaaatcaattggatgatcaagatcgaaacatgtatggttcatcaaataaatcaaagaacgatctgtaattgcaccattataacctaaatcaaagaattctctacggtaaatatagaaagaagcatttaaatcgtacactttgggcgcagactgacgagtgagaactgtacctgcatccttcaccttattatagtagccattttccttctgctcaacttgattgaaataaggacttcttccgggttcgcttacagagaaaagattaacagcatttttatctgctttcaaaagttcaaaagcttcttcaagatcctccattgttcgaagaggagaggttacgtccatatccagcacataatcatattccactccttttgacttctccgtataaagaacgatatctttaatggcatcaattttccctactgtatcaccaccaagtgaagccggacgcttatagtcggatcgaagtccacattcttctaccactctaattatttcatcggaatctgtagagagagcaatctcaacatttccatgtttttcttggaaacgttttgcgatatcaatagtataaccgataagcggtttaccattcaaaaccttaatattcttgccagggattcccttagaaccaccacgtgcacaaattgtaataaggatattcataatgatgattgtttaaaatattcctttagttaatttcaatacctgataagcatgttgtacatcgctatcatttggtatcataccatttattatatcgaagaaatgctttatttcaaccatctgaaaagcattccgttcagtgtttaattgtatagttttaccttctttcagatattcaactatgccattagcaatatcacaatgaatggtatcttcaggaagaaaaatatccattgctcggagcgtctttcgtccgaaataatccaaatgaagctctatcgttgtagtatctgttttagcaatataaatagcaatatcatcgctatcaatttcaagtgatgaaatttgatcttggatagagaatattctctttggcattccataaaaatgggtcaagtaatcccattcatgaattaaatcaatgccaacaccaccacccatattacgatgagcactatagcactcacgataatcttgaccgggtcgccaatcgggaagataacttgaagaaattgcgcgaactgctattgcgtctttgtagttgatattctccttcacatattgcaatactggattatatcgaagtggacaagccacatacgaagggatgttattgatggcatcgaacaatgactcatcaacctcagtcgagtcagagacaggtttttcaatgaaaaacgactttgcatgctttgcaaactttcgaacggcctcataatgcatagaagtaggatttgtcacaaaaacagcatcatacagcttatctgaagatatttcatcagcatagagaaactgtttagcaaccttcggcaaaatatctgaagggagttctcgcgaaaggtcacttctgtataaatctatatcgtaagaatcgccttgtgactctattagttcacaaacattcttgaaatgacgcttaccaatggaaccaagtcctacaaatgcaatagaataatgtctcattatgcttcaatctcatcaatgatattaagaacggccttgtccttttcaaaattccaagcaggctggtagttcttatcttctatctgctttagatacgaatataattcttcacgataaggattctctgtgataaaagccgcatatccctctacgtgctcagaagcatctatgaatgatatattctcttctaactttgcctctatattatattggtttaacgaatcagctgtaccattccaagaaagttgaaattgttcaccataaacttcaatatggcgatatggtttgcgagcaacaacatccactgcaaaaacgccttttgctccagattcatgttcgagcataatgagataattatcattatagtggatatttagtttagtgttcttactcttcattacttttacatcagtaattgcaccgaaagctgtaacaatccatggtaagtcaatggccattatctctcggcaaccattggttcgaggattgccaatgaaataattattgtaactctcccaaggatgccaatcggggagatattgacctacatgatatatatagtttaaaggacattttgcctcatgtactttctcaatgatggtttgggtttccttacgataaagaaaagttgacgaaagaaataagactttccctctttctttggcaagcattatattttcatcatatccatcctgcacaagattgatttctgtaaaaacatgaagattgtgttctaaacattccttaataatagcagcatgagaaagaggggatgttgatataactgctgcatctatgggctctttagcacaagcctcgctaatactattaaaacacttaactccaaatgtctccattacttcagcacaacggatttcttgactatcaattccaaagatctcgacattcttatgttcactaagcaaacgaattctacgcttgcccatagaccctaaacctattacaataatcttcataaatattatgagttatagaacttcttctgtttcaatatatccaatgaatatgtagagattacattataaatattttgagcagtcccttctttatcataaggattttctgttgtcttgcaaaactctctaaagtctgtagataatattatctgcaatcctgcgataatagcttctttatcagacttgcaatccactacggatttactcttagtgcgtccattctgacgatcgcctatatttagagtaggaatatgagccgatggaacttcaagtattccactcgaactatttcctatcacagcagaaacatatttgagagcagaaaggtatcggcgcatcccaagactaataaaagccatacaatgggagtttttagcacaatattcttctatagccactttaatagtatcaccaccttggtctgaattaggcatagtaaagagaactcgtaattcaggaaactcatccaatgcagcaagaaaatctttaatttcatctgctgaagttcgatttcccaaggttacagggtgataggtacatatcactgtattttcatctatcttataatgcaatgatgcctctaactcttctttactcaacaagggtacaagtttcaaattttccacgcctatggcacctacattgaataccctatctggttgctctccaagttgaataacacgtttgcgatattcttcagtagaagtaaaatgcaaactactcattttggtaatgcagtgacgaatactatcatcaacagcaccttctgagacttcccctccatgaagatgtgctataggaatgcggagcatcatacatacagtggcagctatatgcatttcataacgatcaccaaggattacaaccatattgggagttagtctcgaaagagctttcgtcattccttcaagttcagttgccatagaatccaaaacacctacagcgtcgtctgagagtttaggcattgggactttctcattgatagtgaaaccgtcagcctctatttccttatatgtatttccatattcaggcatcaaatgcatatttgttactatcacctgtaactcggaatctttactatcatcaacgagtcgcatgaggcgtgaaagcaatccgtattcagcgcgagtaccagttatgaaacaaatcttcctcataattctatcatttcttcttctgcaaaatcacgtatagctctcgttccaattatttcttcccaatgcataggagaaatacctgttcctggtctctttactgtaagattatattcagtaagtacatctccttgtttgatgggacaagcagcaacaatactctttcgtgcaattgcgagatttttactttcggatgccgagacatgtttttgtccatctccaagagcgaactcaatattccgaatagcagaaaccatagatttaagttcgtcaggttccaaagatgctttgtgatctggaccaggcatattacgatctaatgtgaagtgtttctcaatcacttctgcacctaaagcaactgccgcaatagttacttcaatccccttggtatggtcagaataaccaacctttacgccaaattcttctttaatggcaatcattgcccgaaggttaacatcttcgaatggtgtagggtattctgtattgcaatgcaaaatggttatctgatcttttttcaagccgaacttaagaagagtatcaacggcattatgaatgtcttccacttcacacattcccgttgaaagaataataggcttgcctatttgtgcaatcttacgaatataagggtaattagttatctcaccagaaggaatcttccaaagtggcaagttcaaagatgccaaataatcaatgctatcaaaatcgaaagctgttgaaaagaagtgaatcctcttctctttacaatatgatatcaacaattcatgatcagcttgtgaaagttcaagtttcttaagcatttggaattggctatcattgtcatccccaatattcttcttctgatactcagcctgctttgctttctttgtgactacattttcagccttaaaagtttggaacttaacataatccacaccagccactgacgcagcatcaataagctgcttcgcgagttctaaggatccattatggtttacacctgcttctgcaataatgactgtatgtttcatttcttcaccattaatacggcaggatttcctgcataaattccttcttgtttctgggtttttctaatcatacatcctgccgcaaaaacactatttgccggaatgcttgtggcattgaccatcacactctgactaccaagaaaggtattggcgcctactttacaatcaccattcaccatggctcctgtagaaatgtgacaataatcacctattacagcatcatgttcgatgtttgcaagcgtattgattatacaaccctttccaattctagctccagcattcaccatagctccatgaaggactacagtacctgcttggatttcagcatattttgaaacacgtgcagaagaagcaataattgttgccaaatgaccgcccgctacttcaactttatcatgaagcttaatacgcactataggattcttgataaatccaagagtcactacaaaatcgtagtcttcaacatatttcgttatatcatcatcgcaacctatcacttttgcatccaagatttcctgtcctatatgctcaggcatatccaatacaccttttatcatataaccagcactttctgcagcttctataactgatttacaatgaccaccaccaccgacaagaatcaaagggcgtttcattacaatcttacactagaaggaatattcacgactctatctgcaaaccaaatggtattctccaaaccatcattctcgcagctttcgaacattggcaaacgattcataagttcccagataggacgagtcatcacgccattgtcattggtttgctccaagaactctagttgtgcagttttatcttttagaatcactgcattcaaccaataattagagaatgtatcggatgaatctacaaagaattcgatttctggcacattcttgaagtatgcttcatactctgctgcaactcgacgcttgctttctacgtatatatcaaggttctctaattgagcacaacccagagctgcattaatattaggcatacgatagttatatccgatatgatcatgacgaaattcccaacgatgaggtaccttcgcttgagtggtgatatgcttggcatactttccaaattcttcatcgttaaagagaagcatacctccaccacctgttgtaatggttttattaccattaaaagaaatagcaccaattttaccgaatgtgcctgtgtgctgacctttataggttgaaccgattgactctgcagcatcctctactagttcgatgtgccactctttgcagagattgactatttcctcaatacgaacaggatgaccgaacgtatgcataggaacacaagccttgatgcgacgacccgtattcttgttataacaagcctttgtatcttgttcacaaggatactgaggtgtagcatagtcggtatgtagttgaatatcatcccttgatatatttttgttatctcgcacctctgcattagcttgcagccatgccttcatggcatcaggagaaagtcccattgtagagcggtcaacatcaatgaataccggatgtgccccaatgtatgaaagagcgttgcaagtagcaataaaagttagcgcctgtgtgagcacttcatcatcacgctctacacctgcaagcatcagactcatgtgcaacgcattggttccactgacacaaaccacagctttctttgcacctgtatatttggccatttcttcttcaaaacggtcaacaaacttaccaacgcttgatacgaatgtagtatcaatacattcgcttagatattttttctcatttcctacaaaaacaggaacggaaagaggtgtaaactcttgatttccatatactgacttgataaagtcaatatgttttgaataatctgccataatcaaattacattttttcgtctaagttctttcctttctcttcatgttcgaagttgggtataaactttttaatagattctactacttgtgctttagtaaattcggcagaagcgaatatggattctaactcatcgaagaaactgttaatctcgttcatagttcgatgacgcgactcttccacaactcctaatgcagcaaatctttccatattcactttctcaccaggaacataaaattcttcgtaagctttttctcctgtagtatcgctcttgaagaaaactactggataattctcactatcgtaatccatagcagcagcatatttcttagcttcagaatcgttgacacattcaactttattaaagccttctgcctttacaaaatcatcgcagatagcagagaatgtgagcatctgttcttcgcctaattttggaaaaaaaacttctccaccccttccaagaatacaagctaacatacaaatctggccggattcttcaggggaaacaaaataacgctttacgtcactaggtgcagcaagcggttgtttcttctgtaaacgatgaatccaaccatctggcaacgagccattgctaaatgcgacattagcgaaacgggctgtcgtaaccttgaagtactggttataggccattaccaagtcttccataatacgcttgctagctcccatgatattgacaggattagcagctttatcagtagaaacgcagaagaaatgctttggtggatatacgttaagaagatccatcaatttcttggctttgatatcattgttttcaatcaaggcttgcacactatacttatctttctctgaacgcacatgcttatgtgctgagaaattagcaacaatatcaaagcctttctcctcgcgaaaaatacgttcaaaaataggatctgcaaagtttaatgtgtaacaacggaattcagttgggcagtaaaggccttcagtagaacgaacatcacgcacgagttcggccaaaccattctcatttaaatcgactacaactacagataccggctcaaagcgaagaaccgctttgataaaactagaaccgatggagccggcaccaccaatgacacacactttcttaccttttatctcttgtgtaagagtttcgctatttctaacaatgtctcctgcaaacatgctatcgctacgagatgttacactgtcagaaatgaatttatcgagattgaacatatatatataacttataataatttctatttcaatgattgcagataccactcaaaaagtttctgtacaccctcttcaatttctatcttatgatgccatcccaaagaatgcaactttgagatgtcaataagttttcttggcaatgccgttaatatcacagaaattattattccttgttcgtttcaatgccatacttaaccaagacggtcttgatgacatattcctcttcattggtatattccaatggtgaagtgagcaggctatcttccttcattaattggggtgcatactttgaatagatacaggtgctaccaactaaaccgtgatggccacatacgaatattttactctgtttaactaacatactcttacttcacaattcctttttcaaggtaagcggccaaattggtacggacgcgctcgctttcacgttctacagccactttggccatgtcgctatctatcatcaacttcaccaactcctcgaaactggtcttgcttggattccatcccaattttgccttggccttcgttggatcgccccaaagatttactacatcggttgggcgatagaaatctggagatacctctaccagacatttgcctgtagccttgtcataacctttttcatcaagggcttcacccttaaactcaagttcgatacctacatgatggaatgcaagctgcgtaaattcgcgaacggagtgttgtacaccggttgcaatgacgaagtcctctggtttgtcgttctgaaggataagccacatgcactctacatagtccttggcatagccccagtcacggagggaatctaaatttccgaggaaaagcttgtcttgcttgccttgtgcgatacgagctgcagcaagggtaatcttacgggtcacgaatgtctcaccacggcgctcagactcgtggttgaacaagatacctgagcagcagaacatatcataggcttcacggtattccttaatgatccagaagccataaagctttgctacagcatagggtgaatagggatggaatggtgtgttctcattctgaggtacctcctctactttaccataaagttcggaagtggaagcttggtaaatacggcaagtcttttccaaactgcaagcacggacggcttccaagactctcaatacgccggttgcatctacatcggctgtgaattcaggagaatcgaagctcacctgtacatgactctgcgctgccaggttataaatttctgttggacgaatggcttttaccaccttaaccaatgacatcgagtctccgaggtctccatagtgaaggtgaaaaccgggatgtccttccaaatgggcgatacgttcacggtagtctacagatgaacgacggataattccgtgcacctgataacctttttctaataagaactcgctgagataggatccatcctgtcctgttacccctgtaattaatgctactttatccataacctggtttttgtatttttgtagttgattatttcaaatgttttattggtataaaatatgtccacaatttgtttacgcattaatacattccactacttctaaaattccaaaagaagtttagagaatcatctatcagccacagttcaggagccggcttgccgctaaattcagcccaattcgctttcagcgactgaagtccacgcatatcttctccgggagacgcatactcggcagaggtacaagtgggaacatagtctttcagcggtttcggcaaatcttgtagggacaatacctcaattgtgtgttcccaacatttgcctgcgggataatcgtagacaaagcccatctcctctccgggtaagaggtggagctgcgctaaagtggtctttgaggtcaatgctacccagttgccttcacgtttaaaacgaaaggcatgattgcgcattttgtcctattcaaacagaaaagttatcaaagcgtaaagctctattaagcttatagtgtccggaaccaaaagcacccggctgacgggtgtatccgctaacgtaatttttaaagtgacttcttgagtcgtatttttgattttctttgtcattctcgttcacagtctttaaataacctatacgcttccatcaacctctctccatacctgtttatcgtaaaatccggaccattatagtatttagaaaacgtaaccacgctcttggtttgcaaggcaacgagcattcggggattgtttttaatgaaattagcgaaaagaagaagttgcttatattcgctttcacacatgttttgcacaaagctttctacatccggctcaccgtaagcggcatatttggagcccataatctgaaacataccccaactggtggaactgtccgctgcctcaatatgaatcttacgtgaccgttccagaagggcatactcgtgcacgactcctttgtaatgtcctttttcccacataggataaagaacgtcttcattacctgacacatattcagcgggattgaggccgagcttctttaactgtctccagaatatataccccacaaaacgaatgacgggcttgccgggagcgaaaaagccacccctaccttccgtctccacatgatgaacggctttcaaaacggcagaatcacagttcaagaattgggaaatttgaataaagtcttcgcctgtgagacgtttaataccggaactttctattgtattcatcaaattgttttctatttaggcatttgcctataggtgtacagaatactcttacgtacaggttaatcttccacttcttcccaaggatagggattatccaccacattctgaaattcgtcaattgcttcttgctgttcagcggcaagcgatgcggaatcccaagaagcaatgattttacgtccttcttccgccaaaggctcatcatacacctcgccataacaggctgtaagcaggcgaagcttcaataacgaagcgggaagagtttcgagaatatcccagcaacgatttaaaacttcctggacatgcagttgtttttcaccgtgatctatgaacgaagcgttatagcccatcagaagagcgagacaaacatttgcctgttcttcgatagtggaacctttggcaccggaattatacaaagccgtagtcaggcggtaaacttcaccgttacgacgggaaaggtcgtcgctatagaccggactgccgtccatgcccaaatacatcagatcgtgcgcggcacgctgaagagttagtgcttcttcggaaagagacataatgatttatgatttataatttatgatttatcagctgttcaatggcaacggccgattgtcaattatttgattacttctatgagatccggatgaatggtggcaagcgcaacggcaataacaccttgtatctcgataaccacacggcggtcacgcgcgccttttactttcaggaagacgccttcctgaccctcgaagtcaccgcccgttatacggactttggtacctttggacagattcagctcatcaggttggaagtacatgagatgatcattgtaagtaccggctacagcaataaagcgttgcatctcactgtcggagataataatcttctgaccgctacgggtatccgtaatgtattgcaaatagcttacctgtgatttgatgcgtttcacctcggaaggacgggcatggacaaaaagcaagttatgtacaaccggaaccaaagcacggactttcttacctttcttcatgctgatcttgtattgcatgggaacgaaacaacccattttctctttttcaagaagacgcatggcatcaggctctctacggtatgtggcacgcattgcgtaccatatttcggtctctttgtccgcttccatatcaggggctatttcagaaaagggtgttctcccggggctttgacatccttgcatacacttgaatttcaatcacttgcgaacactttatgtaagatacggcaagtattgtgttcctcttgccaattgatttttcgtagttgttcattaccctatttgttttcgcaggtaaagaactataagcgaatggattaagccaataaatcgtcttttaatcgttcgtttaaaaggcacgtcggaaggctattttcacactaagattctttcaataagaaagtaatcgtaaaatcacaattttatttcagaggtaatcagctatgtattagtaatatatatagcaaaaaagaaaatatttagtttttctttatcagaatattttgttgtttcatttccgggcattatctttgtgcacattaaacgaacgattaaaaaacacccccaatttacaacaatcattattgacaccacattcatcaccccaccccacctcctatttaatcacccttaaagtactatcctgaaagactctcaaaaaacacatcctcattataataatgtacccgcgtatacacacccacaggcacgtattttcctaactttttctttagaccttgttacacacattctataaataataggtagcgggtccccatacctatttaccattccgtgtgtaacacatggaacaaaaaaacattcactttttcagatggaaacaacagatattacagatagaaccgttaattttgctttcgaatagcgaatttaaaataaattactaacttctaaaattgtgattttatgactaaaaaaacacaatcttgagtattgagctcattaacaaagatcattacagcatcgaaatcgagagaaaagaagacagggtcaatatcctgttagttgaaaatgaagcgtttggagaacggattctggtcggggcagaagaaagggaggagttcctcactccatggataaacatgcttatccgccacaaaaaagaaacgggaatcaaaggaaccatggatctggcaaggaaactggagcacatcgcgcgctttgaaaagggaaagcaggaaaaaggattcctgacactgaaaagcattaatactgatatcattaatctgagaaaagcatttctggaaaaagaggaggaagcgaaaaaaagaaagaaaaataagtgaacagacaaaattgtgcaaaaacgcctttttattgctacaaggcgtttttgccattctgaatattatcccctacttcgcggcgccgataaggcggatttaaataactaaaaaacaaatggaaaatattccggttaccgcatacagcggattcagcaatgtccggggagagattacactccggaaagtaattgagaacatcacaacggggatacatgcgaaaagcgtatccaaaatcagactgttagtaggacaaggaaagatggaagaggcgaataatgtgaagaagcagctgcctttctataccgtcacggcgggatatcgggaaaaaaggcaggcatacagcgtgataagatacacgcacatcaccctgctggacattgacgaccagcccgaagagaagctggaagaactgagagggaaaatcaatggggatcccgacacgctggcctctttcctgactccaaaaggacacgggttcaaggtcttcgtgttcctgaaaacggattatgccacccggctaagggctacgttagccgcagaagaaaaagtaggattcagcacgttggaaaaacatcacctggccatgtacaacgcctgcaaggaatattacgaaaaattgctcggcgtggaagtggacggaagcggaaaggacatatcaagggggttcttcacctccttcgatgaaaaggcgtacctgaatgaaggactgctgaaagaggtggacgagacactgacaaatatcattccacccgaaaagccacagccggggagaaggaaaatgataagtggtaaagtggtgagtgataagccggagaatgaagggaagcccaagagtgggaataaaccggagggcaagaaagcagaggccggtaaaccggaagccgagccgtgggaaaagatggaattcaacaaggcagtgctctcagtaaagagaatatcaaagtttgaaccgggaaaccgggacagcttcatgttcgcactgggcaacaagtgttatgcaaaaggactggaagaggaaacagtgatacgcctggcacaggaaaagttaggcagtgaggagtttgatgtggcggcacccatacgaaacgcgtatatttataccgacaagacgtatgaggcgctcgggagaaagcaagaaaaaccggacaccataaaccaggtactcgacttcctgaaaacacattatgacttccgaaggaacgtgatactggaccgcctggaataccgcaacttcaacgagaaggaagaaagatggaaaggcaggttccgccccatgaggacaagaagctacaacgccatcttccttgacctgcaactggcgggaatcaagtgcttccgaaattacctgcagacggtcatcgactcttcataccccaaggacttcaatcccttcacggagtatatcgggaaactgaaaccatgggacggagtgaccgattacatcggccagttggcggataccgtacaggcggaagaccaggagttctggaagaaaagtttcaggaggtggttcgtgggaatgctggcctgtgcattgcaggacgacaccgtgaaccacctggtaatcatactctactccgaacagggaaagggaaagagcacatggataagaaggctgctgccgcccgagtggagggaatattaccggaacggaatggccaaccccgaaaacaaggaccaccagctgctgctcagcacccacctcatcatcaacatggaagagttcgaaggggcaagggtcggagacctggccgggctgaagagggtaatcacacaggagagcgtcacggaacggaaagcgtacgacgcgcaggcgtacaccttcatacggcacgcatctttcattgccagcaccaacagccgccaatgcctgcaggacatagggggaaacagacggttcctgccctcatccatcatttcactggattacaggacacccgtcaactacgagggagtatacgcgcaggcgcatgccctgctaaagcaggggtaccaatactggtacgaaggagaagagatagacgagctgaaccgccacaacgaactgcaccgaatgaaggatccggtggaggaaaacctgctcgtatacttccggaagccggagcccggagagacctgcgtgaaatggatgcccgcagccaccatactcagtaagatagccatttacggaaagatacaggtgaacaggcagacgatacagatactggtgatgtcgctcgaaaaatacgggttcaggacaagaaggaacagtcagggaagcaccgaatatgaagtgatagacctgcaaaatgatgaggtaaacaatggattcagggaaaagaaccgggatgaaaaggacgggaaagacgataaggaagagggagtattgccgttttaaatttcgcatactctctatttatcagttgacaagggaacaaggggaatagaggatgaaaaggtttcttgaaagtagagttatcatataatgtaacgggtgataagaaataatgtaatgtaggattacatatattcttatcactcgttacatctattggcattttatttacaaaaagtacaaatctttcatttgccggattcaaactatctaaggctcaccgagatacttgaatataagtttcacttcaaggggcagataagaatggcggttcttgttataacccgcttccttcagttccgacatcagttgcctgttagcataaatccatcggcgaagaagttgtagggcggtagtaatacatacaccgggattgtaaagcatggcaaggtcggctttggtataagcgcggacagggactttttcatctaagttttcttctttcataagtttgttttttagtgatttacatggtataaaggtactcatttacagcgacaacagaaaggaataaagaaggtattacctctcatttagattctctttttttcatacaaactcaaatagcttcaagcggaaagtggaagggaaaagaacggggtatatttgcaatgtccaaaggggaaaagagcgaaaatcttccggcaagcccatgatggcagagcaaattaagaaaagcatgagaagaggattcggacagctttcccaaaaggatcattaaataaccttgttttttaactttaaaaaatgattgattatgggagtaccattcaaaaagattccgcggagagatccgcgaaaggaggatgcggtggcaaagttttatccgcaactggtaacgttaggggacaacgccgacctggaagacgtggcatacgtgatgaaggagaaaagctcgctaaccttgggagatatcaaaagtgtaattaccaactttgtagaagcgctgattgacaagctgtatggcggacaatcggtgaacatcaaggatttcggagtgttcagcctgtcggcacggaccgtcggagtggagaaaaaggaggattgcacggctaagaacatcaaggccgtgaaaatcaatttccgaccgtcaaccaccatcagaccggatgtgacggcaacacgtgccggacagaaaattgacttctacgatttggaggcattggtaaacaaggacggaagttcgtcaggtggcaactcttccggtgaccagggaggatccggtagcggcgagggaggactggatgagaatccgctgggttaaaatatcactaatcatttaatcaaagaatatgaaaaagtctgtctgggataaaattctaaaagtggtgattgcgatagcttcggctatagtaggagctttgagtgccaatgctatgaatgtatagagaaaaagcgtgccgatgaatcatcatcggcacgtttctttttgcctatatataataaaatcactctaattctattaaagatgccactttatcaataaagtgtttagtcggttccatcattgaatctacatcttcccttgaaaaatcaaataaatcattataatctccttttgagcgccaattcagcaactttgcatatactcggaattcatcaattgagacaatactcggacgtactatctgttctgaaaattgtcctataacaccagaatgtgactttacagaagagctttttctaatctataacgaacataagccgtcatattctcatcagattcattcataacaatactgcttccgattgaacattctgataaaatggagtaatagaatgacgcgaatgccaatccttcataccataagcaaacaattgaattgcttgccctgtcttaacaatcacatcacaaatatgatccataaattgttcttcttccttaaaagtcaatttctctttcggagaaagaaccaatacatcccaatctgaatcatcgtgcgcttcgccacgtgcacgagaaccgtacaaccacacctgcgccgcagcatcgacctcatgtacattctgctttatcaattctaacatcgtttgatagtcgactttcataatgcctcctcttttctacaaaaatagtatttttataacagaagaccaaataaagcctataaaaacacatttgtgcaaacaaaacgtgccggagattaaatcgtccggcacgtttcttttttattgaaatatcatttattgatgttgttctctcagcaaatcattcaccgtctttaccggattgaacgtactcagagaaacttctacaaacaccgtattccaatcgctcatggcaccgttccacagaccgggaagttcaagtgctttgagatccttgccattctttgatttataagagatgaaaccggtagccttatctacgaaattaacaagatcaaatttatgacccttataatcgcgcacagcacaaaccaaatctacaggattaaagtgcgtacccttttcgaacatctcttttttctccggatcgtccatatcaatttgagaactttcaagaatttgcagggaaatagtaccgtcactattatatgccaggaacggaccgccacccggctcgcctacatttttcaccataccgcatacacgcatcggacgattcagtttctctttcagataaagtacgagttcagcatcttccagattcttggtctcaggatttttacagaacaatttcttttgcaggaattgcagaatttcgagcacttgctcgtgagtatatctgccgctatccagaagttccaaataagcaaatgctttttgttgcagcgccactaatactccggcaatcaacttcttatacaacacggtgtcacctttcagtttatcaggcactacattgtcgatattcttgataaagataatatctgcatcaagatcattcagattctcgatcagcgcaccatgaccacccggacggaacaacaacttaccgttatcacggaaaggctgattattcatatcggcagcaacagtgtccgtacagggcttctgttcagagaaagttacattgtaatctacaccgtatttcttggcatagacagctgctttgtctgccaccaggttttcgaacaagcggcgatgttcaggagaaacggtaaaatgcacattgacctttccattcttgttagcagcatagagagcgccttccacaagatgttcttccaatggagtacggcttccatcttcatatctgtggaacttcagcaaacctttcggaagtgcaccataattcagtcctgccgcctcaagcaatgcagccactacagctttataatcaccctcagccatcaatgcgggaatgttcttctcaaatgctttctcacaggcggcattcaagtcattatagaacgcgaacttttcaatctgctcaaaaaatgttttttcgaatttagtttcgggcacatcataatcagccccgagaaactcgaataaattcttgaacatacggcttgccgcacctgaagccggaacaaacttcactaccactttatctgtccgtgtatatgcatcccatgcatcgagatagagcttctgctcttctgccgcaggtgccagaatacctttttccaatgaagcggcagcagccagctttaagtacgggaaacctttctcaaaacaggtcagctgttcagctatctgctcttctgaaatacctttttgcctaagcaactctttgtcttgcggtgttatcatactatctattttttattaattgattgccaaaaatacaaaaaaagcacaagccttataatagaaaggaagaaaaaaactacctttgggcaacaaaaatggacaattatggaaagagatgaatttttcactactgaagagaaggaattgctcttctctctctacagaaaattattgcagttgaccggtgagacattacagaaaggtgactgtagaaaactgaaaacacatcttatcaactctataaaggataaccgcgttcagcgtgataccttcggactgaatccactagttaaagatatgcagactgccgttatcgtggccgaagaaatcggaatgaaacgggcgtctattctgggcatcatgctgcacgaaagcgtgagaaacggagcttgtacccccgaagaagtgcaagccgcattcggtgaagacgtggcaggcatcatccgcgggcttatccgtgtcaatgagctttactccaaaagcccgactatcgaatcggaaaacttccgcaacctgttgctttcttttgcggaagatatgcgtgtgatcctgataatgattgccgaccgtgtgaacatcatgcggcaaatcaaagacagtaaaaatgacgaagcccgtcggcaagtggcaaatgaagcggcctacctgtatgctccccttgcccacaagctgggtttatataagctgaaatcggaactggaagacctttcgctgaaatatacggagaaagaggtttactatcatatcaaggataagctgaacgagacaaaagcgtcccgtgacaaatatattgccgccttcatcgctccgatgcagaagaaactggaagaagccggattacatttccacatcaaagggcgtacaaaatccattcactccatctatcagaagatgaagaagcagaaatgtccgttcgaaggggtatatgacttgtttgccatccgcattatcctggattcgcctgtagataaagaaaagcaggagtgctggcaagcatattccattgtaacagatatgtaccaacctaacccgaagcgcttgcgtgactggctatctgtaccaaaaagtaacggttacgagtcattacacattactgtaatgggtcccgaaagcaaatgggtggaagtacagatacgtaccgaacgcatggacgatatcgccgaacgggggctcgctgctcactggcgttacaaaggtgtaaagggagaaacgggattggatgaatggctgaccaccgtccgtgaagcattagaaaactcggatagtaacgggttggaagctatggaccagttcaaactggatttatacgaggatgaggtcttcgtattcactccgaaaggcgatctgtttaagttaggtaagggagccacggtactggattttgctttccacatccatagcaaattaggatgtaagtgtatcggtgcgaaagtaaacggcaagaatgcccaattgcggcaagtgctgaatagtggtgatcaagtggaaattatgacctcgaatacacagacacccaaacaggattggctgaatattgtaaccagttccaaggcacgtaccaagatacgccaggcattgaaggagatggttgcccgtcagcatgcctttgccaaagaaacgatagagcgtaaattcaagaaccggaaaatagaatatgatgaagccgtaatgatgcgcctgatcaaacgtctcggcttcaagacagtgacagacttttatcaaagcatcgcagatgaaacactggatgtgaatgaaatcatcgataaatatctggaacaacagaggagggaaagtgatacgcatgacgacatcacataccgcagtgccgagggatataatctgcaacagacacagaacgatgaaatcacccgttcgaaagaggatgtactggtaattgatcaggatctgaaaggattggacttcaagctggcacgctgctgtagtccgatttatggagatgatgttttcggttttgttagtgtgaccggcggcatcaagatacatcgtagtgactgccctaacgccacacaattacgtgaacgattcggataccggattgtaaaagcgcgctgggccggtaaatcgcaaggtacgcagtatccgattacgctgcgcgttgtgggacatgatgatataggcattgttacaaatataacttcgatcatatccaaagaaaatgatatctcattgcgctctatcggtattgactcccatgatggtttattctccggaacgatgacgattatggtaggtgatacaggacgactggagacactgctcaaaaagctgaggacggtgaagggagtgaaacaagtttcaagaagctgagttagctacgagtgacaggctacgagtgacaagagtttactccggactgaagacccatctacccgcagactaacgtttagtctaccctagactagacgttagtctaatagttaacagatactaacaaaaaagaggtaaagtgaaatatagttttaaaaaacagatccgcagtttcggatatgcctggaaaggtatccggcaatgtgtagggaaagaacagaacttaagttttcatctcattactacagcaatggtgatagctgccggttttttctttggcataacacgtacggaatggatagtcattatcttatgtattggcgtggtaatagccgcagaattgtttaatacagccattgagaaattggtggatctggtttctcccgagcgtcaccccattgcagggcaggtaaaagacattgccgccggagcagtgctggtgtgcgctgttgcggcggcaattatcggaattattatttttctcccgtatttaagttaagagagaggggaaaggagttaatatgaatccgatagattggcggatttacaagtttcatcttacttttttcctcttataataaggatacgtcagcaaaaagaaaaaagccaaagctaccaggattccaataccgattaccttataaatcaactgaaaatcagtatatagataaacatctgcaataccggtcccatctgcaaattcagaatacatttctccatgatccgataggaaacaacaaactgcaagaccaatcagaataccggtttccatggccaaatggcaagttgtattcgctgttccccgttgacaatgttgcgagagcttaacaaatatcttcgtaaaaggtatcgtaagcactaccagaacaacgagaaaaaacagtgcagcataatccccttgtttgattaacaataatgcaatgccgggaataaaagcaatcagtaccaaattgagggcgggaagccaaccccgcaacaacaagaaacgatcaagattgcaatgccccactcctatcggtgcacggaaagctacatatacccgcaatgcaaatagaatactgaatatactgcataatatagaaaaatatgccgtcatactgaaacctttgagctggaacatccatattcccgctaccactcctaccagcatacccaagcgggctgccagtgcaaagcccagatttccggcactacggcgcgaagcagtagtgatatcgatggccaccgtaatgcctgccgtcgcagccaatccgaatgctccaccctgcacagcagcaagcatcagcaacctcggaaaagtatcgacaaagatatagcctaaagtcgttcccaaaatcacaaatatggaatagacaagtacacgtttccgcttatactcatctcccagatatgcatggaacggccccaccaggaacatcgccgctgcaaataccagaaacatgctgccagcctgccctgtggaaatgcccaatcgggacatcatcaccgagggaagcaccgggaaaagcatgtagatggatgcaaaaagcaggaaattggcaaagcatatcctcataaagcccagtgaccaaagattatcagtattgctctttctcattcgggaaatctaagttcttgacatcagatacataacggctgatagcatcagtcatcacagtatgcagatcggcataacgacgcaggaaacgaggacggaaaccattgttcatccccagcatatcctgaatcaccaacacctggccatctactccaccaccggcaccgataccgataataggaatggtcagttcacttgccacacgttcggctaaagcggcaggaattttctccagtacaatagcaaaacaaccggcttcttccagcatgtgagcgtcactgatcagtttttcagcttccgtatcatctttcgcacgaaccgtataagtaccgtatttattgatagattgcggcatcagtccgagatgtcccataataggaataccggcactgaggatacgtttcaccgtacctataatttcttcaccaccctccagtttcagagcgtctgcatgactctctttcataatacggatagccgaagcaagaccttccatctcattaccttggtaagatccaaaaggcatatctactaccaccatagcacgtttcacaccacgaactacggattttgcatgatatatcatctggtcgagggtaatcggaagcgtagtcacattacctgccatcacattactggcagagtcgcctaccaggattacatccatgcccgcaccgtctacaatctgtgccatagtataatcataagacgtcaacatagatatcttttcgcctctttgcttcatctctacaaggcgatgagtagtcacttttcgagtgtcatctgaaatataaccagccataattttaattatttagttattgattgctttttcaccacagattacacagattggcacagaggaatatcatcctcagcatattatctgtgtaaatcagtgtaatctgtggtgaaatcgccgcaaaggtaatgctttttccctttacttatgcaattctgttaatttatcgtaagtgaacccttggaaatcatctaaaacataatgacacaacgaagcaatttcttcgcgtgaattggtagtggccaaacctattactgtagctccggaagccatacccgctttcagtccgttgaaagagtcttcgaaaacgtaagttgtttccggtgtggtgccaaatactttcatgccaagcaagaagcaatccggtgcaggtttggaagctgtgaacatttcagccgtaagaatacggtcgaacatagtttttatttcgggtttggcacgatatacagcttccatctttttatcattggaactggtgaccacagccatctttacaccattgcgacggagatcggcaataaaagattctacaccgggaataaattcgaatgtcatttcctgctcaaagcggtcgaggccggcggtaatttcttcctgttctttaatcataccgggaaagaaggtgttatagatatacaccaaagtttgtccctttacgcggctttcaaggtcttccatacccaagtaatctactcccattttgtgccagaagatgctatactgcgtctctgtgtcgacaacgacaccgtcgaagtcgaaaagaacggcgatgttttttgtttcagtcatataaacttccttttaccttataatgttaataccttatcaattacgatacaaaggtctgaataatccttgaacagagcaaataaatgagtaactttgctgcaaatacagatacgcggacggcacggaccagagcggacgaacgcggattcattactttctttagattaatagttatggataataaccctcacatattaggtaccgaacgtataggtaaactgctgctacaatattctatacccgccatcatcggtatgacgattacttcactgtacaacatcatcgacagcattttcatcggtcacggtgtgggtgcaatgggtattgccggattggccattacttttccgctgatgaatcttgtggtagcattctgtacattggtgtcggcaggtggatctacaatctcatccatccgtttggggcagaaagatttggatggagctaccgaggtattgggaaatacgctgatgttttgtctgatcaatgctgttgttttcggcggactcgcctttttgtttctggatgacatattaaggttcttcggtgccagccaggatacactgccctatgcccgggatttcatgcaaattattcttgcaggaacacctattacttacacgatgatcggactgaacaatatcatgcgtgccacgggatatcctaaaaaggcaatgttgacttccatggtaaccgtggtttgtaacatcatccttgctcctatctttatcttccattttgactggggtattcgcggagctgccacggcaaccgttatttcgcagtttatcggtatggtgtgggtagtgaaacatttccttgataaagacagctttgtgcgcttccgcccggacttctggaaactaaagaagcgcatcatcagcagtattttttcgatcggaatgtcacctttcttgatgaatgtgtgcgcctgtgtcattgtgattatcatcaacaactctctgcaacgccacggaggtgatatggccatcggagcttatggcatcatcaatcgcctgctcactctctatataatgattgtattaggattaaccatgggtatgcagcccattgtgggatataatttcggggcacagaagcatgaccgtgtgaagcaaaccttaaaactgagtattctgaccggtgtgtgcatcacgagcagtggtttcctcatttgcgagcttttcccgcatgcagtgtccgctatcttcacaaacgatcaggaactgattgacattgcttcacgcggtgttcgcatttgcgtgctgatgttcccgttggtgggtgcgcagattgttatcggtaactttttccagagtatcggaaaggctaaaataagtattttcctttcacttacccggcaactcttatacttacttcccggtctgatcttcttcccccgctttataggattggatggtatctggaccagtatgccggtggctgactttttcgctttcctaacggcacttgtagtgttatggacgtatattcgaaagaaaaacaaagagagtatcgcgtaagtaatttgtaccactcaaacagaaggtataaccttcaactaaaaagggtgtagccctaagcaccaaagggctacaccatccttatcaaagggtgtagccatccgacctgaaaggctacaccctttttattctgctttacagataactgtaggcaaggttaaagtattaaattacctctattcgctcttgatactctgtactggattttcattggcaatgcgccaggctttaagaatcaccagaagtacaataagcaccagtaagcctactgccagcagaacaaaccataccggtgaaggcagtgtactatcggcaaactgttccaaccagacaccggaaacataccaggcaaagccggtgccgaggatcaccgcaccaatagccacttttagtatgtccattgccagtaagctaagaatagaaggagcttcggcaccattcaccttacgaattgcaatttctttggaacgacgttgagtctcatcgttcacatagccaataagtcccatgagtacaataaagaaaatgcaaagagaagtgatccatacagtattacggaaacgatacacattgctgtaattttcccgttggatatccatataggttataaactccaatgcagctttcggatatgcttctttgacaaactcattcagtcgcgcaagattttcatctacaggttcttttaagcggacgttgtaagaaccgttacgtttatccgaaaggatgaaagccgtacaagtctgttccataaaaaagcccatattacgcacatcttctacgatacccaccaccgtaggttggctatcaagacccacccattgtgcattgactggtaagcgttgtcccaaggctttatctccccacttcatcgtttccaccactttacgacctattaatgcttcaccgatatgttcaggccaggcaccttccaccaactgcatacctactgtttgcggaaagtctttcgcaacgttctggaagtgtagcggacaaaggaaattaccttgaatatctgtcagccctgtagtgctgtaatgtgaaagcagcgaattactattgcgtgctacagactccacataaggttgcctgcgaatgtcatcttccactccttgtccgctcagattttccgtggtgcgtaactgccccaccgccaatcgctctgtgcgaaaaccaacacttcgtgtcatcaaatcatgatactgccaaatcgtagtaaccaacactcccagaataaaagatacgccaataaactgtacgaacaacaacccccgcttccatgaacgcttactgtcagtatatctacggaaaatctgtgttacgggaatattagcaaacattctacccggtagaacacctgcgactaagaacaacagaagtacagtcagaccgggaacccacagattttgccagataaagagttctgcaagacggacatgcaacatatcctctatcccttcacggaaaatatacatcaacaccagacaagctataatagaagtagcaacgagtattcctgtttcccacatgaacatacccaacacatgcgttccgtcagcaccacaacacttatgtactcccactgctttggcacgacggctgaacgaagccactgcggccagcacataattcatgatagaaacaaagaagatagaaaagcccagtacacccagtattaccagacggcgcactgagtcaggatagctcagataaatatccggcaacggcaagatgctgaattccatcacatccgttccttctttagtttcggtataacgctccacggctttttgtatacgattgttcatcgcctctacgctttcaggacttttcaggcggaaaagaacgttataaatatcattcgacttccatgtgccgcgaccataaatatattcttcaagagtaggtagtgaaatgactgtgttatgcggatataccgtattgccgggaacatcctgataaataccacgtacagtgacatccagcattttactcatggagaaagtctttccaaccggctcctcgtcaccaaaaagttcgcgtgctttactctgtgagagaaagacagacaaaggtgtagccaattcgtgtgggtcgccacgtaatatttccaagccgatggtctggaaaaaaagcgtatctgcaaacatgacctgcatatcttccagtttcttatcgtcaatatagcagtcgggctgatagaaattaacggaaaggctggcagattctatcaaatccggcaatgcctcccaaagatcagcggcggcagggcgaaaagtgctatagtcatagtctttatcaggaattccatccttcaccctgcggcaacgcattaaagctacattttccggatctttataaaaattctcataactcaattcataagctatttgcgagaaaagcaagatgcctatcagcagccctagtgtcagggacaccagtttaatgaaattactgccccgcccgcgaagcaggatttgaaccgtataataaagttgtctcatatatttctttttttactcgcttttaatactgtttaccggattttcgttcgctatccgccatgacttccagatgacgcaagcgatgataagtaacaggataactaatgctatcaatatatataccggccaggaaagcggcacttgttcggcaaactgatccatccacattccattgatgtatgctgcagatataatgccgataataacagccggagccgctacataaaggacatctttcgaaagcaactccaatattcccgaagattccgccccattcaccttacgaatagcgatttccttggaacgacgacgcacttcgtctgtagtataaccaatcaagcccatcagcatgacaaagaacatagtcaatgccgccaatatcgtggcgttactgaagacacgaaccggattatacttgttcaaaatctgatcttccatactatagaagtcaaccgtcttgtcaggataagcctcagagacgtccttgttcagacgacgcaaattctcggcaaagggttccttgagacgtacatgaacagtattaccaaaggtacgggtatagccaaacataatgacatcctgtggctgatagaaagagcctatatggaaattcttcagcacacctactactttcaaatttcgaccttcggcacgcaacggatgattcagcgccttgtctccccaacgcatccgttccgcaaaagcctcattcacgactatttcgtccgatgcacgcgccggacgcccttccttcatcgtcatccccatcatcttaaagtagtcctcaagtgcataactgaatcgggtcgaaaagagcgattgtccaccctcaccttcaatcattgaaccgctataactccatataggggtactgacagcggaagatacctcctccacataaggcagtccgcaaaagaattgcaaggcaggaccactctcctcttcgccaccgaaataaatactgccaatggctacacgctgcggattatagcccatatctttatctttcacataattgtactgcgccatcaccacatacatcagtccacaaatgaaggccacacccgcaaactgaacgaaaagtaacggacgtttccacccctttttaccttctgtatagcgacggaagacctgcgacacaggtatgcgggcaaacagcctgcctggcagaattccacctacaatgaacagaaccagcaccacaacaagcggcacccagatacggtccggagcaaaaagtacactcaacttggctgcggtagtatcttctatgaactcctggaaattgagtaatatcaaccccatcaacaccaaggccagcgcaataataattcccgtttccaaaagaaacattgagaacaccgtacctccacttgcaccgctgcacttatgcacacccaccgctttggcacgatacgtgagcgaagaaatagaaatgagcacgtagttcagtgacgcgataaaaagaatagccagagctaaaatactcataatgctgtccatgcgtttcacctggtcttcgtcacgatacacatcacggataggtttcacaaaggctgtgtaaccgtatgctttcttatcttcttccggacgatatttctgtatcatggcatccagacgggcattcacgatttctttatcagctcccggacgaaaacggatatattcgtaatagctgtcaccaccacgccaggaatagttaccccagccacgactccaacctgtaggcatggaaataacagcctccggacgcatagtagcgttctcgggtaaatcgacataagtgccctttaccgtcagttgcaactccttattataactaatgacttttccaatagggttctcaccaccatatattttctgagccaaatcgtcactcaaaaatatgacatcgttctgcatcagatctttttccggattgccactcagtacctcaatacccatagtcttgaagaaaagtgaatcggctaatattttccgggcatcgatgcgtacactgccattgtaaagtggtgaagaaacaaaatacgcaatgctggtagccgcctctacctctttgggaaaattctccagaatggcacctgccacaggaccacagttttgtttttgcggttcaaattgttcaccttcagccgagaatatggagtatatctgataaagatcatcatagtccttgtagcaagtatcatagctttgttcaaaagccacacgtgaaaacagcagaatactcatcgtcaatcccaatccaagggaaatgactttgattatattcgaaccgcgcccacgcaacagggtacgtatgacataatatagttgtttcatagttcaatctctttataaacttatactccttgtgccgcaatactggccaccacgctaccatcaaacaaatgtatcgtacgatgtgcaaacgaagcgtcatgctgagagtgtgttaccataataatcgtcgttccctcccgattcaattccgtcaacagattcatgacttccgcaccattcttagaatccagattaccggtcggctcatcggcaagtattaatttaggattagttaccacagcacgggcaatagctacacgttgctgctgaccaccggacaattgttgcgggaaatgcttggcacgatggctgatattcattcgtttcaatatatcctccaccatccgacgacgttcagaagccttaatgccgagatacgtcaaaggcaattccacattttcataaacattcagttcgtctatcaggttaaagctttggaatacgaaacctagtttacctttccgcacacgggtacgttctttttcttttaggtctccgacttcctgtcccagaagtttatatgaaccttccgtcggattatccagcaatcccaagatattcaacagggttgatttaccacaacctgacggtcccatgatggctacaaattctccctctttcacctcaagattcacatggttcaatgctactgtttctacttccgttgtacggaatactttgctgatgtcattaatttcaatcatgatgtttattattaaagtcttatataatattctgtttatataaatgcagaaagcatgccaaaacttaatattcgttcattatcaacaatttatctttttaaacgtatacaaatagtgtctaataattagacacctccgtctaaaaaatggacaattatggaaattagtacagcacgaaggaacagaaaaaaggaaaataaggcaatcatttatctaaaagaaaactctatctttgcaatcagttttcaatcaaagagattatataatattaatatcatacacatgaaactatctaaactcctgttcattccgcttactggcctgtttatgggcggttgcgatatgatagattaccatccttatgatgtccgcatcagtggtcagacagatataaataatcgtaatatagaaaagatagaggccaattgcaaggataaggcaactattcgttttgtcactatgggtgactcccagcgttggtatgatgagaccctggactttgtcaatcaccttaataaaagggatgatatagattttgtcatccatggcggagattacagcgacttcggtgttacagacgagttcctgtggcaacgtgatatcatgaataagctgaaagttccctatgtcggtctgatcggtaatcatgactgcctcggtacaggcgaagaaactttccgtatcgtattcggtgatcctaatttttctttcatagccggtcgcatcaagttcgtttgtctgaacaccaatgctatcgaattcgactactcccgccccatccctgattttgaattcattaatgcccagttagatgatcgccgcgacgagtacgaccgtactatcttttctatgcatatacgcccgttttgctttgaattcaataataatgtagctcaagcttttcaatattctattaagcaatttcctggattgttgttctgtacggccgcccatgaacatcgtttattcgaagaagatctttttgaggatggcgtgatgtaccacatgagcgactgcatgaaacaccgcaactattatatatttactgtaacccctgatggatatgagcgtgaagtggtctattattaaagcactgacgtgcttccttcttgtatgctcatcaaccggctatgcgcaagaagccaatacaataaccatagagccacgccgggtattcagagataccgttatcatcacaaaacatgataccgtgtggctggagaaagaaaaagtaaaaatagacagtgccgatatcagtaataaacgttccagccgttatgataagcgtgtccatcgctatcgtaaacactgggaaagcctgataccaacacatacaaaactgcaatttgccggtaacatgggattgctgtctctgggtacaggatgggattatggaaaacggaatcagtgggaaacggatatttttttcggtattctgcccaagtacgactccaaacgtaccaaaatcaccatgactctgaaacaaaactatatgccttggagtatcgctcttggaaaagaatttgctgtagaaccgcttgcatgcggtatgtatttcaatacagtattcggcgatgaattttggacacatgagcccgaacgttatccaaaaggttattacggcttctcatccaaggtacgcattcatgtattcctgggacaacgtctgacctataatattcccccacgttggcgtctgggagcaagagccgttactttttattatgaaataagtacctgtgatctgtatgtagtaagtgcattcaccaacaagtatctgaagcccaaagattatctcagcttatcgttcgggctgaagacacaactcttttaaccttctctataaccacaaagtcatgtctgctcacgcggacatgacctcaagagaattatgtaataggatatgacaatgatgtaaaaatggcaagggctgcatcttctttgtgcgaagtgcagccctttactttagatcttaagatatcctatatttaataagaacgagcaaataaagcacgacaagcagaaggtttgcctgtcaccatacagatacccggttctttgtcatcatccaagaacgtttcgaaaggaatacaacggatagttgcttttgtttcttctttaatcttctcctctgtttcaacagtaccatcccagtgagcaagaataaatccaccttcttcaatcttctccttgaattcatcataactatccactttcgtgatatgagagttacggtagttaagggctttctgatagacattagtctggatttcttctaacaggttctttacatattcttcgatgccgtcgcaagaatgagtttctttctccaatgtatcgcgacgcataatttccattgtattgttctccaaatcacgaccacccataacaagacgtaccggcacacctttcagttcataatcagcaaatttgaaacccggacgtttgttatcagcattgtcatacttaacagaaatacccatagacttcagtttagcaacaatgcctgccactttctcgttaatcttctgcagcatctctgcgttcttatagataggcacgataaccacctgtattggagccagatgcggaggcagtacaagtccgttatcatcagagtgagtcatgatcagtgcacccatcagacgagtagataccccccatgaagtagcccaaacatattccattttgttttccttattcacgaattgcacgtcaaatgccttggcgaaattctgtccaaggaagtgcgacgtaccactttgcaaggctttcccatcctgcatcatagcctcaatggtataagtatccagtgcaccggcaaaacgttcattagctgattttacacctttcactacgggaactgccatgtatttttcggcaaattcggcatatacattcagcatacgtacagcttcttcttcagcttcctcacgggtagcatgtgcagtatgcccttcctgccacaaaaattcagcagtacgcaggaaaaggcgggtacgcatttcccaacgcattacgttggcccattggttacacaagataggcaggtcacgataggaattaatccaattcttataagtattccaaatgatggtttctgaagtaggacggatgatcagttcttcttccaacttagcttccgggtccacaataactccgctaccgtcaggagcatttttcaggcgatgatgagtaacgactgcacattcctttgcaaaaccttccacatgttctgcctcacggctgaggaaagatttcggaatcaacaatgggaaataagcattcacatgccctgtttccttaaacatatcgtcgagttgacgctgtattttctcccaaatagcgtatccgtaaggtttaatcaccatacagccacgcacagctgactgttctgccaggtcggcctttaccaccagttcattataccactgcgaataattctcgctgcgtttggtcaggtcttttaattctactgccattttattttgttttttaaagtttttcggattatacaaaatgaggaagccacaaatctgtaacttccccatttttcggcaagagcggcaaacgaggctcgaactcgcgaccctcagcttgggaagctgatgctctaccaactgagctactgccgcattgctttcttaaaaagacggtgcaaaggtaaaagaagtttttttatattcaaaaataaaaatgtacttttacagccactaaagtgaaaaaaatatgaaacggatcatactcattaccggaggtgcccgctccggtaaaagcagccatgcggaaaaactggcgctaagtctctctcctactcctgtttaccttgctaccgcacgtatttgggatgaagaattccgacaacgcgtaatccgccatcaacaaagacgcggaccggaatggacaaatatagaggaagaaaaagagctaagccgtcatcaattaatcggaaagactgtcctgatagactgtgttactttatggtgtaccaacttcttctttgatgtaaatgcagatacagatagtgccctgacagctgccaaagaagaattcgaccgttttacagcgcaagatgctatcttcatctttgttaccaatgaaataggtatgggggctacttcagaaaatgaaattcagcgtaagttcacagacatgcaaggctggatgaaccagtacatcgccgaacacgctaatgaagtatggttgatggtatcggggattccggtaaaagtgaaatagagagaggaaaagatgatagaatggtaagatgataagattcaaagttataaatattgcatatgaaaacatttaagataatacgtccggacgagaatatccgtccagcattgattgataaaattaataatctgactaaacccaaaggttcattaggtactcttgaagatctggccttgcaaataggctggatacaacaaactctgtctcctaccctgcaacatccacagaatataatctttgccgctgatcatggcattgtagacgaaggtgtcagcctttcgcccaaagaagttacctggcaacagattagtaatttcttacatggaggtgccggagtgaatttcctttgccgacagcatgggtttaccttgaaaatagtagatgccggtgtagattataatttaccttatgatacaggtatcatcgacatgaaagtacggaaaagtactcgaaattatctgcatgaagctgcaatgacagaagaggaaatggaactatgcctggagcgcggtgcagaagtggtacgcaattgccataaagaaggtagcaatatactcagttttggggaaatgggtattggaaatacatcttcctcatctctgtggatgacttgctttacaaatattcctctggagcaatgtgtaggtgcgggaagcggactggataatgttggtatccgtcataaatatgaagtattaaaacagtcattagataactacagaggagatcgttctccccatgatatcatccgttattttggaggcctggaaatggtgatggtaataggtgctatgcttcaagcagccgaacttggaatagttattatggtagatggattcattatgacaaactgtattctggctgccagcaaattatatccggaagtactgcattatgctattttcggacattgtggagatgaaacaggccataaactactactcgatcacatgaaagccagaccgcttttaaatttaggtctgcgtttgggtgaagggacaggtgccatctgtgcatatcccattgtgcagtccgccatacgtatgattaatgaaatggataacttcgcgcatgcttctataacaaagtatttctaaacgtatgaaagtcctagcagcattcatcttcttcacccggcttcctttttggagaatcaaagaagtcccggctaaatacttcaaacgtattgttccatactggccattagccggatggctgacgggtggtattacggttggagtactgtggatagcagctcagatacttcccatttccatcgcatgggtacttgccatcctctcccgattgcttatcacaggctgtctgcacgaagacggactagctgatttttttgatggctttggtggaggcaccaccaaagaacggacacttgccattatgaaagattcccagataggaagttatggtgtcataggattaatagtctatttcttgctattattcttacttctggaaaatctacctttgaaactgatttgtgttctcgtaatttgtggcgactgctggtctaaattctgtgcttcacaaatcatcaattatttgccttatgcacggaaagaagaagaaagcaaggcaaaaaatatatatgaccgcatgacctggcaagaattactgacgggattcatctgtggatttttacctattatattattcttaccgatagatttctggccggttatgatctgccccattttgacattcaccctattgtatcggttgatgaaacgtcgtcttcaaggttatacaggagattgctgcggagctacattcctgctttgtgagctttcattctatttgggtgcagtaatcttgctgtatgcacatatcaaatacggtaacccggatttgattaatgtttatttaaaataataattatatggaaattatttttatcagacatacctcggtagatgtccctcccggagtgtgctacggacaaacagatgttcctttgcgaaacagtttcgaacaagaagctgccgtcacatccggaaatttaaaatcttaccgtccgaaagggagagatttcgattatgtatatactagtccgctatcccgttgtgtacgtcttgctacctactgcggatatcctgatgccgaacgtgacaaccgaattatggaaatgaacttcggggattgggaaatgaagaattttgatgaaataagtgatccaagactgaaagaatggtatgccgactacataaacgtacctgctacaaacggtgaatcattcgccatacagtatcaacgtgtcgccagttttttggatgaactgaaagaaaaaaattatgagaaagtagccatatttgcacatggaggcgtattgatttgcgcccaactttatgcaggagctataaaacaggaagaggcattcagtgctttgactccctatggaggaatcattcagttaagacttgattagatatccgaatactaaacaagaccaatggtccttctgaagccccttcctgcaccttataagtaccattaaaggcatgaatgaagtgcgcattgatttcatgacggatcaatgctgtcttgttttcaaagcgtgctttggccaaaggcgtacctgtcactttaaagaacaacatattcttttctttatcgtgtctgatccgaatagtaatattgtatgtattctcatcattctccgatggtatcaacagactggacaacaaggaagaaaacctgtttttatctatacttatcgccatactttctatatccgtcttcaaacgaatactcactcgcccattatcggtatgttctgcaatggctatttcttgccgacacaaggccatcacttcacactcctcctgtacatactgtgtcttaccggattccaaacgagaaagttccaggatactattgacatactccaacagattttccgcattttcctgaatcattttaccatattccaccttcgcttccgcagtgagttctttcgactccgtcaaaagttcggcaaaccctaccaccacattcagcggagtacgtatgtcatggctgatttcagattgcaagcgatccttagtaacattatccgcttctgcctgcatagccgcatttgccgttactttttcagccacagcaatcttccgggacaaataacgagtataaagatagaacaaaagcactaacactaacaatgtgataagaaacaggaaaccacgctgataattggtatcctttattttctgtttttccagaagaagatcatcaatatgatagatttccttcatttgtcgtaactgatttgctgaaaaaacattatccaatgaatcctgagtccgtatcaggtaacgcctggtttcaatagctccgtcaatatcacccttatcaatctgtgtagatgctttataattaatgaaagtagcgaatatggaagcatcatgattcagcaccacggaagtcacctcatctatcaacgcaatactcttatcatattccttcgtacgagtataatactgtaactgaactaactgaacattcagccaaaacgctatatcgacatgactgtccagtaatgctttagccttatccatatgttccaatgccacaggaaaattcccctgttccataaagaggaacacatatttaagttggcagtcgatttcaaagtttgtccaattcttacgggcttcgggttcacgggaaatgatttcctgcaaagtctcatccatctgtttgagataaatatgtttcagactatcctgcccggcattgctatacattcggataatgcgtgaaaggatatccacacgcaaagcagccttagtctgtggggtcaaacgctgacaagctttctggaagatcttcaaggcttcatctcctctactggatatcccataagcacaccccagactattgtacgatgcaatttctccattattacaatgatgttccaaagattcttttaatgcttccttagctatatatacagccttttctacctgtctcttggaagccaatgcgcgactgatagcggccttctgctccagataatagtcataagtgcctacttccggagcatactttttcagttcattcacccaataagtcaggctgtccggatcatgtagtttatcatagcaggaagccagataatacgctcccagattttcatacgtcacattcttctgggcacgggcttcctcgtacaaagcggtagagaaagttttgttataagggggatattgatgcctgtaagccatatcacgtaaataagtaagcctgacaagtgtattcggcatcgcatgtgctattttcagaatactatcctgatattgttgtgcattggcatcttctgcatacagcaaacaagaatatagcatactcagcaaacaaaaccatattactacgatatatctcatcatacagcatcctccccttttgatttatacttcaacggatgtgtaaagcagaaacgtgcaccttgcgtatagttgctgtccacccatattcgtcccctcatataggtcacaatcagctgacatatagagagccccaaaccactaccctgtgcaaagtcattcagtttctcaaaacgctcaaaaatcaagccctgtttctcaagcgggataccgcaaccggtatcagttacagagaagaaagccgtattaggatcggataattccaacttcaatacgatagaaccttctttagtaaatttagtggcattcaccaacagattaatcaagacctggcgaagacgggcatcatccgtatctatcattagttcagaaagctcggtatcataacgtagttccacttcaagtttacgagaagcagacactgtttccgaagcctctctacaaagtttcacggcatcataaggacgtatattgaacgttatattatcattctcaaaatcagaaaaatcaagaatatcattaatcagtttcaaaagctgaaaagagttgactttaatgatttcacaaaactctttacgagattcttcgtcgaaagaatcatcatctgaagccaatacagccgagaagccgacaatggcattaagcggggtacgcacttcatggctcatattagacaggaacatattcttcttctggatagcccgttccgccttctgtatcatcacttcctgcgaatgcttcgattcttgcagacggaatatcttcttccagctgagatacaagaaaagaaataagaccagcgtgcaaacaataatacctcccaagtaaaaacgataggaaaacaagcggtcacgttcattctgataagtcagccggtcggcttggaagcgggtggtcaactgatctatctctttaggataatttttctcaaaagacgatttaatgtatgaaaagaccaaaccgtattgcttatatgcttcttccttgcgccccattttcacaagcaggtcagccttatcttgcaggacttccttgtacaagctactgttgatttcagcatagtccgtatgtaaaaaagcatcataagttgtcagagatttctcatattcaccggtacgttcccaatacatagcctcggctatcaagaaatgttgcataatacccggaatcagtttttccctcaaatgctccacttcatccaagtgttggcgagctgtcttcacagaacccttaaacagttgacaataagcattgaagatatgtcggacagcttgctcctgttcggaaagactatctgcgggaaaacgattcaggcgggtcatgaaatatgctgcctccgtaaaattacgaatacgaagattgtgctctactaattccaacaataacatccggacatgtattccctcaccggacatttgatcgaacatctctaatgcctgtacatgagcacttcctgcttcctggtttcgtccggtataagaatacacctcactaatggcattcagtgcaagagctgttcccaaagcatgcgagagtgcacttgcttttgaatacatctgctcactccaatcaatggccaggcgtatttctccacgaaaaagatatgattttataagtatacgttccagttcaaagtacgtattatattgcttggtagattccagataattgaggatactatccagattgatagccgagctttcttcctttgtcagataatcaaagcccatactgttgtgaaaagcagatatcacttcatcttgaatggtagcacgctcgacttctgccaggctatcctcccctgctgataatgggaaaacgcatccaaagcatactatatggagaacgagatatttcagtaagtttctcatgaagtttgtttgtttcgtgctgtgtggtgtttgtgctgccattcaccgcatacgctggcaaatatattcaatatttcccaagaagccaaaaattgtgaatgactaaatgaaaaaagaaatcaaagtagtagttattatcagaattactatcattattccttcggcacggcgattgatacgaacagctactttcatatcttccgtggttaaaagacgatcattactaccgatgtaaggcttccagacttcttcaccgaaataattgtgcggacctccgaaacggcaatccagaataccggcaagagcagcctcgggataaccggaattcgggctggcatgttgactgccatatattccgacgaatctcaacagagccccaaaccggcctcggggaagaaaagcaagtatcatgagaaaagctgtcaaacgggcaggaatataattggagacatcatccaggcgagcggcaaaacagccgaaagcacggtaacgctcgttacgatagccaatcatggaatccagagtattcaccatcttataggcaagcataccggggatacctaataacatataccaaaataggggagcaattactccatcactcagattctctgcaagcgtttcaagtgctgccgtacgtacttcctgtgcagaaagtccggaagtatcacgaccgactatacgagctacctgcttcctgccttcttccaacgaacgatctacagcttcgaataccatacgaacttcacggataagtgtggtacccgccagacagaaaaaaatggtaagtatctgtagtgccagaagtaatcccggagaaaatgacgctatccagtgaaatagatagtatgccgcaaaataaacggcaagaacaagaacaatagctacgaaagcaccttttagtcctcgtcttgaacctttattcaacagatgctcgcagaatgaaatcatctttccgaatgcaactacaggatgaggcaaccaagcaggatctcccagccagcgatcaagcaaccaggcagcaagcaagggcaggctgaggacaaatacggtgtttaagataagaagaatattttccattgtgataacatataattgggggcttttctgtatggttatgaattaattcaccacagattacacagattgacacagattctattttagtgattattagattaataaatctgtgtgaatctgtgtaatctgtggtgagtcttattcattaccatttcgatatgtattatcaataagtcgcaaaccattgttctatagcctgtacgagccgatcattttcctcagctgtctgggcagcgatacgaaagaaatgttcatccagaccttcaaaattagaagcatcgcgaattagtatgccatgttcattggcgaggtaattcttgagagcagaagccttgccaatgcgaagacgaaccaacataaaatgagtttccgtctcccatacctcaagaccgcccaagctctccaaagcatgacgtaaacgagccgtctcctgcaaataaacagaaatattcaagggattaggcacatcgtaagccagcagatagattccggcctcaatagctaactgattgacagaccaaggcatacgatgagtacgcaaacgactgagcaagccttcgtcagcagttatatatcccagtcgtaaacccggaacagcatagcgtttcgtcatggaatgaagcaacaggacattcggaaagtcgactgcttcatccggcgaaaacaaaggctgtacagtaaagaactcgtaagactggtcgatgacaaaacaaacctgcggattacgggtaatcaattctttcagataggctttctctatgaccgtaccagtaggattgttaggattacaaagccatagcatacggatatcaggcggtaagagataattggtttctgctgtcggaagcttatagagtgacgtcacccgatgaccatgcatgcggcaagcgtcagcatactcgctgaatgtaggttgaaaaatggccgtattagtaccacgaaaagtttgtgctataagataaatagcttctgtagcaccattcgtcacacaaacagaggcagcagtaaggtgatacttctctgccagacgaccttccaaagtataaggttccggttccggataagaagaaataccgctgatacagctacacaaatgagcctgaagtccggataaatctacacgattatacacattggaactgaaattggccgttataggccgctcgaatttataggaatcatctccgtgtccttcaatcatgagttgtcagtattttataaataagtggcagatcaacatgactacgcacatggtcggccagtttattgtattgttcttctttgaattgatgataatcgaaagattttcccgcatcggcaatcttgtcggcaaaaggttccagaaggaagtcgatgaatgagggattgtcaagaataccgtggatataggttcctatacaggtacgatccaggaaataaccgtctgcaccgccatcttccaaaagattcagaggggaaaccggtgcatcataaacaggaacggtggtacccatgtgaatttcgtaaccttggagaagttgagagttgagagttgagagttgagaatgggctgcgctgtcggtggcattaattgtcaattgtccattgtccattgtcaagtggaatcgtacttgccgggtaatcttctctcccgtcatatgtgtactgacaggtaaaagccctaaaccgggtaaacgttctatttctccttccacatggtcaggatcacacacttcctgtcccataatctgatagccgccacaaatgcccataacggtggcgccttcacgatgggcacgtatcacagcttgtgccacaccattacgacgcaattcgtgcaaatcggcaagggtactcttgctgccgggtaataagatgatatcggctttcgccaattcatctacattattcgtatagaaaagatgtacccggggatcgcgctccaacacattaaagtcggtaaagttactgagatggcgcagcaatacaaccgctatgtttactttaccctgctctgtctgcacggatttcgtggcaagggccagcgaatcttcttcttcaatataaatatctttataataaggaacaacgcctaccacagggataccacaaagttcttcaagcatctttactccggattcgaacaaacggatatcaccacgaaatttattgattagtatgcccttgatccgctccctttcgtaaggacgcagcaacattaatgaaccatagacactggcaaaaacccctccccggtcaatgtctcctacgaggatcacatctgctccggcatgtaaggccataggtaggttgaccagatccgtatcccgaagatttatctcggaaatacttcctgcaccttccatcacaatggggttataacgggtggcaagacggtcgaaagctgaacagacctcgtgacgcaactcttcacgaccttcaacacggaaatactcataggcactacggttaccgatgggacgtccgttaagtaccacttgcgaggtatgatcagaagagggcttcaacaacaacggattcatatctgtatggcagggaactcctgccgcttcggcctgaacagcctgggcacgacctatttccagcccttcaggtgtagcataagaattaagtgccatattctgtgccttaaatggtgccggatgatagccatcctgacggaaaatacggcagaaagccgcggcaataatgcttttacctacatcactaccggtaccggcaaacataataggatgaagtttctccataagaaaatgttttttagagagggcaaagataatgcaaatcgagtgcagaactttcatgcttgcatgaaaaagttatgctgaggtattggtaataggtattaaacgctccttgtaataggtattaaacaatctattcaataggtattaaacgatctctttaatagatattaaacggtctctttaatagatattaaacggtcttggtaattatccgaacaaaaagaaactttcattttcatgccgccattgaacaatagaaacgaacgagtgtttgagataaacgaacctaaaccaacaacttgacgtatgaaacatattttattgatcgttctgttgggagcaagcctatctgtgacggcgcaaacgaaactctccctcagctacgacgacgccctacaaatgctgcaaaaaggcaatcaaagcctgaagattgcggacaaaggtattgaaacagcccgtacagagcgggataaactgaatgctttgtggtatccgagcctacagggagccggtacgtatgtccacatgtccgaaaagatagaagtgaaacaacccctatcccaattcacagatccggcaaaggattttgtacacgacatcataccggacgataaattcattagcggaatactggatcagataggtagctacactctggcttttcctcttgctccccgcaatttgaccactgtaggcttaactgccgaatgggtggtcttttccggtggaaagcgtatacgggcaggcaaaatcggaaatcggttgattgaccttgcccgggaaaaccgtgcacagacagatgccacacaacgaaccctattggcagaaagctattacggtctcagcctcgccaaagaagttgcagcagtccgccaagacacttataatggtttgaaacagcattatgaaaatgctcttaaacttgaagctgccggaatgatcgacaaggccggacgcctctttgcacaagtgaatatggacgaagcctggcgggcactggaagccgcacagaaagaagtaacagtcgtggaaagtgctttacgtaccttgctcaatctggaggacacctgcaaaattgaacctacgtctcctctctttatcaattccatactcccggcaaaagaggagtttcagcagactatgcgttcggggaactatatcctgaaccagttgtcactacaacagagcattgctaaacaacaattacgtatagaccaaagtggttatctgcctgacattgccctgttcggcaaacaaacgctttacgcccacgggatacaaagcaacctcgtgccacgcacgattgtcggagtaggtttcacctggaaccttttcgacggattggcaagggagaaacgtatccgccagtcgaaaattaccgagcaaactcttgctttgggaaaagataaggcacaagatgacctttcagtaggcatagacaaactatacacaggattacaaaaagcacaggataatgtacaggcactcaactcaaccattgccctgagtgaagaacttgtacgaattcgtaagaaatcctttgccgaaggcatggcaaccagtaccgaggtaatagatgctgaaaccatgcttgccaccgttaaagtagcccgcttggcggcttattatgaatatgatgtaacactaatgaacctgttggcactttgtggtacaccggaacaattcagaaactatgctgttaaatgataatttatcggcgagggaatgggtacgcggactacgcggataaggcggacgaacgcggactttaatcttttagacgcggatgacacggatgacgcggatttttaaagctgcgctatacataccggcatatcacaccgaaggaaaaaagaatccgcgtcatccgtgtctgaaagattacttgcacgccgaaggagaaccttgctccagcgctacgctggtaaattatcatttaactgtacaacaaatatataacaattatggaactatcaaaaaaaagcatcagcatcgcatttgtcatcatattggcaatcactatattagtctctctcttgggaatgttgctcatgagtcatcagccccttgtgctccaaggacagatagaaacaaccgaaatccgtatcagcggcaaacttcccggacgtgtagattcattccttgtccgcgaaggcgactgggtgcaggcaggtgatacacttgtcgtcatcaatagtccgacgatagaagccaaataccggcaagtaaatgccttggaacaagttgcccaggaacagaataagaaaatcgatgccggtacccgccgacaaatcattgccaccgcacaacaactctggaataaaaccaagagtgacctggccttggcgcaaacaacctaccaacgcatcctgacactgtacaaagacagtgttgtcacctcgcaacgaaaggacgaagtagaagccatgtaccgtgccgcacaagccgccgaacgtgccgcctacgaacagtatcagatggcagtagacggtgcacaaagtgaggaccgtgcatcggcacgaagcatggtagatgcagcacgaagcacagtggacgaagtttccgccctccttgtcgattcacgcctgacagcaccggaagacggacagattgcaaccatatttcctaaacgcggagagcttgtggctccgggtacccctattatgaatcttgtcgtcatgaacgatgcacatgttgtactcaatatacgcgaagatctgatgccccaattcaaaatggacggtacattccgtgcagaagtcccggctatcggcaaaaaagatgtggaattccgtatttattatatcagtccgttgggcagttttgctacctggaaatcaactaaacagacaggaagctatgatatgcagacatttgagatacacgcccgtcctacccaaaaagtagaaggattgcgtccgggaatgtcagtgctattgaccatagatgattaatatgtgtaatcattgaaataactttgtaaatgatgaaacatccattatataacgtactctgtcgcgaacttcgccgcatgacttcccgccgactttatttcggggtatgtctcgcgctgcccctgttctgcctgttcttcatggcaaccattttcggtagcggacaaatggagaatatccctatcggcattgtcgaccaggataacaccgccacatcccggcaaatagtgcgaaacatttccgctgtaccaaccttcaaagtaacccggcacttcaccgatgaaacagccgcccgacaagccgtgcaacggaaagaaatctatggttacttgtccatccccacgggttttacccaacgggctacgacaggaatgaatgccacactctcttattattatcattatgcccttctttccgtaggtagtgaactgatggcagcttttgaaacggcactggcacctgtcgccctctctcccattgctatggaagccatctctttgggagtcagccaggagcaaatcaccacatttctcctacccgtgcaatccagtatgcaccctctttataaccctgacctcgattactccatttatctgagccagcctttcttctatgtcttgttccagatacttattctattgataacggtttatatcataggtagtgaattgaagttccatacggcacaggaatggctgacaacagcgcggggaaatatcctcacagcagttgtcgggaagttattgccttatactttcatcttctccgtaatcggtattttcgctaactatattctatacggtgtactgcatattcccttccatggaagtctgctgatgatgaaccttatgacaatactctttattattgccacacagacacttgccgtattcatcttctctatttttccacggatagcttatatcatcagcattgtatccatggtcggttcactcggtgccacactctccggagtcactttcccagtgacaagtatgtaccctcctgtacatgccgcatcctacctgtttcctgtccgtcatttcacggaaatagcacaatccatgctctattttgattcgggattcgggtattactggcaatcggcagccatactttggctttttccgttggtggcgctactgatactacctagattgaaacattggattctgaaggataaagaagaacttagtatttgtgagaatgaaacaccgcttccccgcgtacacaacactcctcactactcaatagcaactgtcattttccgcgaatggcgctccatcagcaccaatgcggctatattgttagtactaatgggaggtatcttcgcttacggacttttatataacttgatgtatgctcccaaccttgtgcggaaaacaccggttgccatcgtcgacaattcccattccgccctcagccgcgaatatatccgtctgctccatgccaccccacaagcatcagtctatgcacttactccgaactatcttgaagcaaaagaatggctgaaacagagtaaagtagatggtattctttacctccccgctgactttgatgcccgcgtcggtcgcggtgaacaatcagtctttaccgtttatgcctccacggatgctttcttgaattttaagaatctacaagaagcttcttcccgtgtaatgcttgccgtaaacgatgcacatcgtacagaaggtgttgtattcttacctcctcagggactgctggcagtagcctcatcggcacctgtaaacgtgtcgggtacagccttatataattataccgaaggatacggttcgtacctcatccccgctgttatgattgtcattatttttcagacattactgatggtgataggaatggtgacgggagaggagtacccgaaggggaagatggtaggtaagcacaaaaaacttacttggcttcaagcattatataacatttccggaagaactttcgtttacgttatgctttacttcatctttgccttatttctgttaggcttgcttcctcactttttcagcattcccaatataggaaatggcagggatattattatgatgatgattccttttctgttagggacaagtttctttgggttggcggcatcacgctacttcactgattcagaagctcccctgctgatgattgccttcttctccgtaggatatattttcctgtccggagtttcctacccgcttgaactgatgccatggtactggcaggcagcacactatgtagttccggcagcccctgccgtgttggcctttgtcaaattgaattcaatgggaggaaccctggcggatattcgtccggaaatgataacgctgtggatacaagttatagtatatttcctgttgagtctgtgggtcttcaaaaagaaggtattctattttaggcattaaggctgttttctctttctcttataagcaaacgcttgccatcgttcctcgtcccatccttgtcgctgcatctccatgcgtgccatgacaaagaaaagatcagaaagacgattgataaagcgcaaaatatcttccggtacagagtcttcccgattcaaagtccagagccgtcgctcggcacgacgtgccacggcacgggcaaattgcaattgcgctgaaatctgggttccccccggcaagagaaaataatcattatcttccaactgaagcatcatggcgtccatagcctgttcgcactgcacagtcatttccgctgcatgcagtgggttcggattaccgctccccggacgttcagtatctgcatcccgcaatgcagaaggagtagcaacgtggctcatcactaccattaactcacgttgtatatcatgcaacaatccctgccaaacatcatctatcggcagcaacgacctgacaatacctattacagtgttcaattcatcaatacagccgttagcttctatacggatatcatccttcggaacacgttctccaccgtggatacctgtcattcccttatctcccgttctggtgtaaatctttctcatgacactaaaattttagaataaaaacggatttcccgggaccggttcaaacagcctcatgaatccagtctctccccaatataaatgcgtataacttgcaatcagattcttatagtgatagaccggtgtgttcaccggctgtcccttggcattatatacctgtgctgccgaggttagttcctcatccgactcaatgacctgcgagtaatggaactcatgcccacgtatcttcatacctctcaattcaaagctcctataccccagtgacaaacgcatatcacccttaaatgcggataccttgacgggcagtacacctgccatattgtactccatacgggtatcagtacctgtcatcaaaacagatgtaagatacatcatccccccacactctgccagtgtatatccacctcgctctatatagtctttgatggagttcatcacattcgttgccgcactcagttgcctggcacggttctccggataacctccgggcaggtagagtatatccacatcatccggtagtacgacgctattatcctccggatcaaaataagtaactttccccaagccattcaaccactccagatgttctgcataaataaatgaaaaactctccttattgcgggcaatccatatattcatattggcaagcactctctttcttctctccggtttatcaggaacatccacacttcgtcttgtcatctccagcaataactcaatatccagttgacgttccagttctttcatcattgtttgggtgatacttcctttctctttccggctaaagtccagtcccaaatgacgactttcttctttcagcacatcatacttccgcaaacacccgaaacaaagaatattcagatcttcgcagatttcacgcagcatctcttcatgccggtcaccgcccacctggttgaaaatgacacctgccacctccacttgcggatcaaaatccacatatccttttatcattgccgccaatgagtaagccgccgccttggcacttaccaccagcaccacaggcagacgaagcacctttgctatctctgccgacgagcctttactacggtcatatccgtcaaacattcccatcatgccttctacaatacaaacatccgcatctactgcatgatgattatataccttgcatacatgatgctcggaagccataaaaaggtccagattgtaagacggaattccgcaagctttttcatgaaacttcgtgtcgatataatccggcccgcacttatagggctgtacacgtagttttttctgcgtcaataacgtcatcaacaatcggctgacagtggtttttccagtgcccgaagtaggcgccgctatcagaaattggggaatatttcttatcataccgcacagatttatttcccgcaaaggtagtatatattccctaaaactcttaccttagctgcccaaataaaagtaaattactatgattactgaagaactcaagaaattatattgtacgtataccggacacgaaccggaagctattgaagaacttccttcatccggctccaatcgtcgttacttccgccttacaggcatccctacccttatcggtgtcagcggaacttccctcgaagagaatcaggctttcctctatatggcagaccatttccgcaagaaaggactgcccgtgccacaagtcgtagcaaagagtgataacgatgcattttatctacaggaagacctgggagacactctcctgttcaatgccatcgaaaaaggacgcaagaccagtgtctttgatgaagaagagaaacagcttctgcgcaagacaatgcgcctgttgccagccgtacagttctccggtgcagacggaatggacttctcatattgctacccacaatcagaattcaacagccgcagtatcttatgggacttgaattacttcaaatactgttttctgaaagctaccggaatggaatttcaggaagaccgcctggaagatgatttccagaagatggcggacgtattgatgcgcagtagttcggctacattcatgtatcgtgatttccagagccggaacgttatgattaaagaaggtgaaccatggctcatcgacttccaaggcggacgtaaaggtccagtttattatgatgtagcttccttcctgtggcaagccaaggccaattatcctgagagccttcgcaaagaacttttaaaggaatatttggactctctgtgtaaataccagcctgtggacgagaaatatttctatgctcaattacgtcatttcgtattgttccgtaccatgcaagtgctgggtgcttatggcttccgtggctatttcgagaagaaaccccattttatccaaagcgtccccttcgctattgaaaacctgcgacaactattgcaggaaccctatcccgaatatccgtacctctgccatgtgctgaaagaacttactgagctgaaacaattcactgacgacctccagaagcgccgccttgtagtaaaagtcaccagttttgcatataaaaagggtatacctgaggattccagtggcaacggtggtggctttgtattcgactgccgtgccgtaaacaaccccggtaagtacgaccgttataaacccttcaccggactggatgaacctgttatccgcttcctggaagatgatggagaaataaccacgttcctcgaacatgtatacggtctggtagatgcttccgtgaaacgatatatggaacgtggatttacgaacctttccatttgtttcggatgcactggcggacaacaccgttcggtttattcagcacaacacctggcagaacatctgaaccagaaattcggagtacaggtaaatctgatgcatcgggaacagaacattgaacagacatttaaagcgaaaagctaaagactatctcctaataacccgctccgtaccaaatccgtacctgctccgtatctatacgaacagcctttatacggagatagtacggagttgatacgaacctaatacggagttgatatggagatggtacggagatcatgcagagatagtacggagttggggcataaatctccttctttttcaatccgcttatgaaacttacatttaaaatcttaattcaatttatcagtagctcaagaatttaaaacaatgaaagcaatgatatttgccgcaggcctcggcacccgcctgcgcccactgacagacaatatgcccaaggcacttgtctccgtagcaggcaaaacgatgctggagcgtgtcatcttaaaactaaaagatgccggcttccatgatatcaccataaacatccaccattttggaagtcagattatagacttcctccgtgcaaaccagaacttcggtgtggatattcatatcagtgacgaacggggtgaactgctggataccggtggtggtatcaaaaaagcccgtcctctgctggagagcaacgagccttttcttatacataatgccgatatcctgacagacctggatctcaatgctttctaccaccaccatctggaaagtgatgcagatgccactctgctcacgaatcaccggaaaacatcccgctatctattgatggatcaggacaatcgtctttgtggttggacgaatatttctacaggcgaagtactccccaaagaacttgattatcccagcgatcattatcagttgcaagcctttggttgcgtccatgttctttctccctctattttccgctatatggaagatgaacgctggacagggaaattttccattattccgttttatgtggatatctgcccgaaagcacacattcaaggatttcctatagacagcgaaaactggtttgatgtaggcaagccagagacactggcaaaggcagaagcctattatgcgtctttataaaacaggtttcatcttcaccaactgcccctgggcatcaaataagtattcgtaattgaaagaaccgtaaatacgatactcccagcgggcacttttctcaaaacggcgactgtcatccagaatggtcgcctgatagtcggtctccagttcatgaatgaactctttagattccgggtccgggtatctataagtggggacaattacacgtatatcgggatattgctctcgcagatttttgatttctgtacggacagcatctttttcattgggcttcagaaaaaagagtaaacacacggaatgtccctgccctgcaatgtccgaaaagagcaaactgtctttctctgcatactccacttgtttgaagtcaataaaatgatctcccggcttcaggctacgggtagcatccagcatccgtttcagtcctatcaatacagatgtactgtcgcgcatttgtgaaggagttttctgatacaatgtctccagttcatccggatagatcgctgcccaacgatcaaacaccatccaccctattgcgttccgggcattgtcgaatacaaattgccgcgtagcttccagtggaaaatcatcttcatgccaaagtttccaaagacgtacgttttgtgaatggagattggtacttttatccggtacaggtattgccggtgggactacatttatcaacgtcagttttcctctttcgggataaaagaaattcatgctaccgggatgctccattccatagatatgcaacgtatcttcttttccggaaaatgaaacttctccgtttctgataatagcgaagtccaaaggagctttcccataatcacggtcacccgtcatacggtcggcgccatatcgccacaggtagaccgtatctccttcgtaagcgcccagtccggtgcaatgcacagtaaaagtatgttcttgcgattggcaactgatgagtcccagaaacaaagagtaaaatatccattgattgattttcataaagcccagatagattgagtaaacaaacacattgtacaaaagaacaatcttttcagtaaagatgcaagcaaaaaagacaatatataaaagcatttgttaatgaaatatccatatatttgtgacataacattaaaaagactgactatgaaacgactgagattaggactatggacatgtttctgcctttgtgcagccaccacccttatgggacaaaacaaggtgaaaacaactgccgaaaaagtaatgctgttcattgacggtgcccaagtgacgcgtaccaaacaagtagatattccggcaggaaattcaacgctcatctttaccggattatccccttatatggatgcacaaagtatgcaggtcagtgccaagggaaaaatcaccgttacggcagtcaaccggcaatacaactatatagacagcctcgccgtcagcgaaaaacaacaaagcctgcaaaaggagcttaaaaaaatagagaaacagcaaaaagagcagaatgccgagcttggacttatcaatgccgaatatgaaatgctgaaaacaaactgctccgtcagcaataaaaataccgctacttctctgaccactatcaaagaagtgaatcaatattactccgggcagctgaaagctctgaaaacaaaagaactggctatcaatgaacagatagccgaacttaccatcaaacagggacaacttaactctgaactggcacaactaagcggtaaatctctaaccccgatgagtgaaattatggtcaatgtaaatgcgccagcagcttgcaaagctacattcactctgaactattatgtaaaaaatgccggttggttcccttcctatgatgttcgttccggtagcctggccgagcctatctccatcatttacaaagccaacatctttcagaataccaaggaagagtggaagaacgtagaattatccctttcctcctctaatccttccaccggaagcgtagcccccactctgtctacttactggttggattacggacttgcagcaccacgctacaatttgaatctcaatggaaacactgtttcaggagtcgttcttgataatgaacgtacgcccgtaataggtgctaccgttaccattccggggactacgataggagccatcaccgacataagcggtaagtattccataactattcccaatggacaaaacaaacttcaattttcatatattggctatcagactcagaccagagatatacaaggaagtattatgaatgttacccttcaggaagatacacagatgttggatgaagtagtggtagtaggttacggcgctgaaaggaaatctcttatggcaggtgctgtctccggtcttaaggtaaaccataaaaaagatattcaatacgaagaagaggccagcatggccctcgacgttgaacaaaaccagggacagatgggctacgaatttgaaataaaagtgccctacaccattccttctgataacaagcctgtagttgctgaaatcggtcattacgaattacccgcttcctatacttaccaaagtactccgaagatagataaagatgctttcctgattgcccaggtaaccgattgggaaaagctaaacttacttgaaggcgaagcaaatgtttactttgagaatactttcattggcaagtccattatgaatgtcacccaacagaacgacacactatctttctctttaggtcgtgataaacgtatcatgatacagcgtacgaaagagaacgaatatacctcacgcaagtttatgggttccaatcagacgcaatccattgcatggaaactttctgtccgcaatacgcgtccagaacctatcaatcttacgctttacgaccaactgcctgtatcacgcaacaataacattaccgtaacagcagaagaaatcagcggcggcagtctggatgaagcgaaaggcatcatcacctggcaaataaccttacagcccggcgaacaacgtgatttagctttacgttataaagtgaagtaccctaaagggcgaaacttaataatagaataacactttttcttataatccaaagacaagttgatagaccatctgctccatacaggcagatggtctatgcaacaaaaatgtattcaggaaagaaataacataacagtgtattacttataataaatattaattcatataatattaatataggtcacatgcatccttttcattttttgattgtttattctaacaaaagaaagaagaagttatgaaaaaaattatcgcattattgatgttggttttcataggtgcatctacaacaatctatgcacaggaaagtaaaagtgaaagtcgtcgtgctgaacgtaaagcacaacgtgatgcagaaaaagctcgggagaaaatagaagaagaacgagcatacactgatgcagtacaagccataaaggagagaaagtttgtattggaagcggatcgtgtgacattcaaaagaggccgtagtgcttttgttacatccaataccaattttatccttttaaatggtgaccgggcatccgtacaaattgctttcaatggcgcctttgcaggtcctaatggaattggaggtgttacagtggatggcactgtaggtgaagtaaaaaccaccactgacaaaaaagggaatgtaacttgcaattttagtgtgacaggtgtaggaatctcagcacaagtttccatcaggctcactcatggccgcaacaatgtatctgccacagtaaatcccaatttcaactcgaatagactaacgctggatggtaaactcgttccattgtccgagtcgaatatatttaaaggacggtcgttctaattattgtaattgaacacttgcggctgcgagagcctgcgcttgtacaagtgaacgttcacacttgtaacaagcgcaggctctcgcagccgcaagtgttttttataaaagttttcgtgcagataacactcaacacacctacttataagtctctaaatcttcacataaatacattgggtctgagtcgtgaagaatataagtcaatcgagctggattacgacgattatcccacaatactagcactgttataacatcatctgcaaaataataaaatacagaataattggggatcaccaccacataacgaacgtgaggatattctgtcatatgccccaacaaaggattaattgcaattcgatttattgaaactattatctgtcgaaaaagagattcactgtatttggatgtaccattacgttcatcataaaactcaaagatttctctcatttccagaagtaccgcttctgtccattctacttttcgctccatcgacttagcctatattccatttcttcagtagacacaacctctttacactgcatctgttccaaagcattatcaatcttatcacgcaattcagaagaaaagtatagaacattatccggacaacgattatttaataatgcctcaatgtcttctaatagccgttcatcgtttaccgccattaggcgttgaaacaaaagttgtttacgttctcctgtcgtcataaagtaccgtattaattacatcctgcaaatatagagttttttatttatgattcatttatttgatgcttttttatatacacttttgttgttctttctttaaagtttcacatcttattatcttataaagacacaaatacattacattccagtatgtatctcttttaatattataaaaacattttcagatacgtccattgttcggactaactttttttataactttgccgcagttttggtttcacttcccctacgctacggggtaagtgatgaaaagggaatcaggtgaaactcctgaacagacccgctgctgtaagttccttccaagtcttggaacactctgtgccactgtccgtaagttggatgggaaggcgttctaagatggaataagtcagaagacctgccagaaacaacatagttttaatgctttcgggaaataaagcaacaaaacatcgagtctggcattctttattctgcccataaagaaatcatttctccttgtacatacattcccgaaggtaagtcataaataccgttaacaaggatataaatgaaaaagattgtatgtgtactgttattatttacctgcttgtcacagataagtataatagcgcagaataaattcactctatcagggaaagtcacagaccaacatggtgcacctttagcattagcaaccattgctattgagaattcttcatccggaacctatacagatgataatggcaggtactccttgaaagtttcacctggcaaacgcacattggttgtatccttagtaggctatcaaacagtaaaaaacgccctggatattcagcaggacaaagtactcaacttcacattacaagaaagtgctgttactttgaactccattgaggtttatggaaagacacagacacagaaagtgaaagaaggagttttttccgtcaatgctctcgatataaaacctatagtaaattcgctaaataacctcaatgacctggtaaaccgtacaacaggcattaaggtaagagaagaaggaggtgtcggttcagactttgatttgtctataaatggtttatccggcaattctattcgctactttttagatggaatgccattggacactaaaggaagtggagtttcacttgctaatcttccggtgaatattatagaccggattgaaatatataaaggtgtggttcctgccagcttgggaacggatgcattgggtggtgccatcaatattataaccaaacaagataagaaaaattatctggatgtctcttatggcatcggttcattccatacgcacaaagcagacttgaatgcacaatttgtagaacctaaaacaggactgattatccgacctactgtgggagtaaattattcaaagaatgattataggatgaaagacgtgcaaatgcgggatgagagtggtgacaatttcatatatggtaatcctaaacgcttccacgatgactacttctccttactggggcaaatagaggtaggagttgccaacaggtcatgggcagatgcattcttcgtttccgcttcctattccaagacagataaagaattacagacgggttctgttcaagacaaagtatatggaatggcagaaaagaactcagatgcctggaatatctcagcacattaccagaagcgtaatttcattctgaagaatatgcagctgaatgctgccctctcccatacttgggatcactcattgaccgtggacaccacctaccgaaaatattactgggatggtggatacatagatggccagcgtaatgaaattatgggcaaagaacgatctatgcgtcattataagcgtccattgactgtggtccgtgccaatctggattataaactgaacaatcatcataactttaacttgaactatcatctgagtcgtaccggcaacgaccgttatgatgatttagataccactttcgagccatccaacgatgttgtgaccaaacatatcctaggcttttcctacaatcagtcgttattggatggcaagatggagaatgtgtttttcataaaggattatatcaatcacccgaatatccggcagaccgatcagcctagcgtgactggttctgaagcggtacaaggttccacaaccaaaaactatctaggctacggtgtcggacttcggtacactgtagcggaagctttagccgtgaaagtgtcctatgagcatagtgtgagacttcccatcgcacgcgaactattgggaaacggtactaatatctacgccaacgtagcactgaaaccggaaaacagtgataacttcaatgccggtctattcggtacgtggcatccgggtaccggacataccttctactacgaagcaagcggattcttccgcaaggttgacaactatattcagagcgaagttgctgaaaaagaaggtacaatgaaatataccaatgtacccgcagtccacattaagggtgtggaaggagaggtacgctacgattggcaaggtaagctgcaacttgccagcaacgtcagctatcaagatgcccgcgaccaacagaagtacaagaatggcggaaaaccatcggctacctacaacaaccgtgtacccaaccgtccttggttgtttggtagtgcggaagcatactatactttccgtaacgtggcattaccagaaagcaagctacgcctaggttgcacttatcagtggatacactggtattaccttttgtgggaggcttatggtgccactgaaggcaaggcacgcattccggctcaacatatctgcaatgctgatattacctactcatggaaacgcggacgctacaacattgctttagagtgtaccaatttcctcgacaagacagcctatgacaactacaagttgcaaaaacctggacgtgccttctttgccaagttccgattattcattaactaatcattaataattattcaagatgaaaaaattcaaatttacactcttggcctttatggcagccatgatggcaatctcatttacggcttgttctgatgatgatcctactcctactccagatccgggtatcaatgaaggtgattatcacttcgacctttttgtaaccgtaggtaagcatggcggtatgagcagtaaaaacactactattgtcactagtaccagtacattgacggctgatagaggtgtcatcaccgtcgaaggagtaggatcggaactcggagattactctatggagtctatctcaaaagggaaatactattatcaaatccctggttccgctgaccgcttcgtaaagtatcagatcaagaataataaaatcgatgtgattgcagagcgccctttcaagactaatacttataaagtacgtgcctacacacatgcctggattgacgataacacactcgttatcatatctaccaacggcgacaaggataaagttctttatacgaaactgaaagcagacgatttaacgatccttgatgaaggtgaagtaactatacccgctcctaccgattggaaaaagctgacaagttcaggtattctcacctaccgcaagtcagacaataaattatattacttctactactggaaagaaaaggcaggccaaactgttgcaagtgaacaagagcctaattttcatgcagccatcatcaacccatcaactatgaaggtggaaaaagatattatttctcccgttgaaggtgaaatggcaggaagtgcttacggagaattgatgcaggactgtgtagcgtatgacgaagctggtaatctttatctggcttgtttccatgaagaagcaagcggtcttgaaaaaggaatgttgctgcgtatcaaagcgggtgaaacagagtttgatacctcttacaatggttattccaatgcagatggtaagttgatgactgttcagtatttaggaaataacaaagctctggtatatgctcgcaacgataatgcacctattagcgacaaagctgctgctgcaggaataaagaaacctacagctattgatgcattctcacattactatgccatcattgaccttactactggaaccaaaactcgcctgagctacaatggcaaagaaattgcttacagcggtggccgcttctcgcaacgttccgttatctttaacgataaagcctacatcggtgtagatacagaagaggatgccaatgctattatctatatctacgacattaagaccggtaccgtagaaaagggagcagaagtggaaggtaaattctacttcgacatgatacgtgtcgttgaaaacgattaatcatcatatattcaggtacaggttatacgataacaagaatcattaatctctttcttgtaattttcgtataatctgtacttaaaatataaattgacacataacctttttcaaaatatttaaaaagcatcatttctaccttatgaaaaagctatttatccttttatttctttgcaacctcactttcctatgctctgcgcacgagggggaaaacttcgtagcaagcgatatgctcgcaagtatgaaacccggcgataaagccgccttgctgatggtacacttcggtactacgcacgatgatacccgtgccctgaccattgacgctatcaatgcgaaagcccgcgaagcattccctgatctggaaatgcgtgaagcctttacttcccgtatcattatccgtcgtcttaaagcacgcggcatcgagaaactaactccgctggatgctatgctccgtctgcgtagtgaaggttacacacatgttattgtgcaaagctcgaacatcattgacggtgtagaaatggagtcacttcgtcgagatatggagagtgtacaacctttcttcaaggaaatccgtattggcactcccctgctctattcagtggaagatacagaaaaggtagttgaaatattgaataacagactcaccaatacgcaaaatcaaaaagcatccgctaagaaaggtgagcatttcgtacttgtcggtcatggcacctatactcccagcaccgccatttacagccagatggactatatgctaaaagctaatggactgagtaacttccacgtaggtaccatcgaaggatatccttcatttgagacaatgctggcacagttgaaagccggaaaggcgaaacaagttaccttggtaccatttatgttcgtagctggagatcatgccaagaatgacatcgccgaagattggaaagaagcactcgaaaaagaaggctacaccgtgaatgtccgtatggaaggactgggacaagtacccgaaatacaggaaattttcatcaaccatatccgctttatgctgaaacatcgcatactggatatcatggaaaagaaagccggatatgctgccggaaaagatgtggaataacagatgaatatcattaccaaattaatgtactctttacataggatactgggcacactgctttgtatcctatttcttatgtggttcctctccgcttttgtgatgatgtaccaccgctttccacgtgtcagtgcaaaggaaaaactacaaaagcaagaattactctccgcctcaggcgactcactgcctgatatcacttctgtcctttcacgtctgcccaaaggagaaaaagtgagaaaactcaccttagaccgcagcctggggcaaacaatcttccatatccgtaccaacaaaggaatacatgaacttcacctggccccatcggacacattgtcgataatcgacaatgaacgtatccggcaaatagccaccttatggtccgcctcccccattgcatacattgacactctacatacactggatcagtggatacctttcggtgaactgaaaaaggaaatgcccatttataagatacattttgctgatgatgcaaaaacacagctttacataagttcacaaagcggagaagtattacaactttccaacaggaacgaacgcttctgggcatggctgggagctattccccattgggtatatttcacttggctacggcaagacgccacattgtggagtaaaaccgttatttggttatccggcataggttgccttatggtaattgcagggatatgggttacagtcgacgtatggcacaggacacgtaagagtcatcgccaagggttctcaccttaccggaagaaatggtatcattggcactatgtcagtggcatttttttcggaatattcgtattgacctttactttcagtggcatgatgtccgttgccgacattccggaatggattcataaaccggctttgaagagcagtccgctacgtacactgcaaggaaaggcgcctcaaccagaagattacacgctggattatcgcaccgtgattaccagtttcccgaaagttcggcagatagaatggagcaatttccggaaacatccctactataccgttaaagatggaaagggagaacaatatattgatgctacggatagtgtaccacatactctgcaacttcaggaaaaagagattcgagaaggtgtggaaagtgtatatgctgccgacagtattccggcacatcaacgtccggagatacacatgatactattgaaccattttgaaacttattaccgcgatatgagtagtatgtatcgtggacgaagtcaacttcccgtctggaaaataacggtggatgatcctgaccggagtgttttctatattcatccagaaacaggtatcatccgttatgtcaatacctcttcccgttggaaatactggagttatacggctatgcaccggatgcgtcttccgggcttgaattcaaataccactttacgtaagacagtactatggatattactactgggtggaacagtaacttcagtaaccggtatagtgttgagcataaattatgttcgaagaaaatgtcgcaaaaaacaaaaacgcttactatgaacaagaaaagaacaggaataatccttggctgcataatcgccgtggtcatcgtttgctttgcagcctacaattattggtgggcacctacccgcatcctcatcatcaatcccctgcccgcacaagcagcagacatcgcactgaataatgattgcagccatatccgcgtgaagtgcatcaagatggaggaagtgaaagacctttccggctatgatgccatcatgatgtacggacgcggattgtttctggacgaaacacaagtagcggaactggaacgggtagctgccaaaggtgttccagtttttaccaatgcgctaagacacttcaacttcatcgtcaaccacaatatcactcctgaacaacaggagaccctgcaaatgtatttccaaaatgcttgcagacagaactacaggaatgctttgcgctatctgcgacacatttccactccccatcgactgggtgaccgttcttttgaaaatcccatagaattacccaacaatctgttttatcatcaggaatacggccaatacttcaaaactccgcaagagttgactgaatatctgaaacaaaagcaactctatcacgaaggtgggcgcaaccttgcttttatctcaggtatcagttttccggtggaaggcacccgcgcccatgtagataccctgatctcccgtctgacacaggcaggtttcaacatttatcccatcaccggtagcggtaagggacgcgaagacctgatacgtacccttcatcccgacggattgatttatctgcctatgggacgtctgggaaatgactcgctcattaactggttacatcaggaaaatattcccctcttcatgcctttcccactggtacaaccgcgtgaagaatggctgaaccccaacgtacctgtaagtggaggtacactgacggcacgtgtagtagtacccgaaatagacggaggtatggcccccttatgtatttccacacaaaatgaaaatgaagaaggatatattctgcacacaccggaaccggaacggatggatgccttagttgagcatatcagcaaatatatgtctcttcgcgataaatccaacaaggacaaacgcgtcgctatctgctacttcaagacacccggaaaagatgccttgctggcaagcggcatggaggtgattccttctctttataacttcctgaaacgcttgcgcaatgaaggatatgacgtaagcaacctgcctgccaccgtagaagaattcggaaacaggatatatcgtgacggctctgtcatgggttcgtatgccaaaggggcacaggaacaattcctgaaaacagcacaccctgtatggctgtctaccggacaatatgaaacctgggcaaaagaagtgattctgccggaaaagtacaaggaagtgactgaccgttatggagacgctcccggcaatttattagccacggaagacagtatcgccattgcctgcctgcgattcggtaatgtgttattgtttccacaaccccgtccggcattgggagacgatgatttcaagctggtacatggcatgcccgtagcgccgcctcacagttatctggcaccttatctgtatatgcagaaaggttttaaagcggatgcactgatacacttcggtacacatggaaacctggaatatactccgggaaaaaatgtgggtttatcacaggcagactggtcggaagcactggtaggtaatctaccgcatttctatttctatactacgggaaacgtaggagaaggtattattgccaaacggcgtacacatgctgtactcgtcactcatctgactccgccttatgcggaaagtggcatgagacagcgatataaccaattgctggaagatattcataaacttctggatgaaggaacggaaggacatcgtatgctgggaatgcgcgtcaagaaagagactgttcgcctgggaattcaccgggacctggaactggattccgtaccggacaaaccctatactgccgaagaactggaacgtctggatgcctttaccgaagaaatagctaatgagaagatgctgggtgcatactacacgatgggtgaaccttattcggaacgtgacttactgcaaaccacccttgccgtcagcgcagatgccttggcttacgaaacggccaaaactgaccgggataaaggcaagattactacggaacaattgcaagactttacatatatagcccaccattatctgccaacggcaaagaaacgactgacggctatgttacagaatccgcctcgtgatacggttgccattgccccggaccttcgccccgcattgcgctatcgcgaacaactaatagcttctaccgccaatgaattcaacgcaatggtgcgcggcctgaatggaggaacagttctgcctgctccgggtggagatccggtattgaacccctatgtattgcccacaggaaggaatatgtacagcgtaaatgctgaaacaacccctaatccacgtgcatgggaagacggaaaacgactggcggaagcaaccctgaaacaatacaccggcaaacatggggaatatccacggaaagtgagttatactttctgggcgggtgaatttatcacaaccgaaggagccacgctggcacaagtcttctggatgttgggtgtggagcctgtacgcgatggacaaggacgtatagtagatttgagacttgtgcccagcgaagaactggggcggccacgtattaatgtagtggtacaagtctcaggacagcttcgcgacatagccggatcacgtctgaagttactgacggatgcggttcgcctggcatcggaagcaaaggacggagcatatcccaactatgtggcatcgggaacagtgctacaggaaaagttactggtggaaaaagggacttctccaaaacgtgcacgggaaatgtctgtgatgcgtgtattcggtcctgtcaacagtggatacagtacaggaatcatgggatataccgagcatagcggatcatgggaggatgaaaaggaaatcgcccaaggatatctcaataatatgggtgccgcttatggtgatgaagataactggggagaggttcagaaaaatttatttgcctccgccctctccgaaacggatgtagtgattcagccgcggcagagtaatacatggggacctatttcattggaccacgtatatgaattcaccggcggattatctcttactgtaaaaacgctgacgggtaaagaaccggatgcttatatggccgattaccgtaaccgtaccaaccgccgtatgcaggagaccaaagaggcgattgctgtggagacgcgggctacgatactgaatccgacattcatacaggaacggatgaaaggcggtgcaggttcggcacaaatgttcggagagattttccgcaatatctttggctggcatgtaatgcgtccgtcggcaatggataaggagatttttaatgacctgtaccggatgtacattcaggatgaaaataaactcggaatacaggattattttctccgggtgaatccggcatcctatcaggctatgactgcggtgatgctggaaagtgcacggaaaggctattggaaagcaagccctgaagagttgaaagcaacagctgcactacatgcacaaataacccgtgagaagggtgccgcctgcacggagtttgtatgcgacaatgccaaattacagtcgttcgttgcagataatctggatgtgaaagagaaacaggaattcaatcaggatatgaaagcaatatatgaagccgcttcggccaatggaaaagatgtagtattgaaagaaaagaagctaacaccggaacaggtagcgcagaaacgtactacaaacggattagtgattggaggcgtggtactggtgatgttcattggactggttgcattaattaaaataaggaaaagtaaataacttcataatgattagtgtttagtgataagtgattagcaccatgcggagtaatagcgcagccactaatcacttatcactaaacactaatcactaacaatttaccattcacccaataactatggattacgtcattcccatattagcaatcttcatcaccctcagcttcctgctgaaggtcggcttctatccccgttggggaacgtggctgacagcactatgttgtgccctatttgttttactcattactccttgggtaaccgagcaatctaagacagcaatagcaaccttttttacttcccgggagaaaatgctggatgtatctgtttgcatcacactggaagccgccatcctgataaccttttgcttcgactgcttctccggaatgcgtacaagagacactgcattcaaacgaagcgtcaccttcctgctccacctttaccccggtttattgataggtggcgtactatgctatgtactggctgaattattattctcttttccaggcactgatttcaatatgctctcgtggatagtaggcaccaccacattcttacttatcggtatcggtgtccgattgctacaaatcctcttgggaaataaagccctgcgtctcgaaatcctttttattgtaaacttattcatagtcgtactaagcatcatagctaccggctactaaataaacagtaactactaaaattataaatatcattatggaaaccatttcaaactcactcttctggatatccaacggactacttgttccggtcatcgtattattactcctgttctttctccgcgccattatccttgccggaggtttcttcggagaattccaccaacgaatgaaactacaaaagcaactctccgagatgttggaaaccattactcctgaaaacattaacgaacagttacagagcttgccccaagccgggaaacaacctttgctccgttgcctgaaaaagcttgccgagcaccgtgataacgccgcctactgcgaacgcctgcttgccaacttcgaagtagacgccgaaaaagagctgggacgctcgcgcactttcatcaaactcggcccgatgctgggactgatgggaacactgattccgatgggccccgcccttgtcggactggctacaggagatatttcctcaatggcttacaatatgcaggtagcctttgccaccaccgtggtcggtatggtgattgccgcagtcggcgtcatcactctgcaagtgaaacaacgctggtatgcccgtgaaataaatgatctggaatatctggacaagaccctgcgaaacaaaaccaatgaataactctcagcctcataaaaaaatatgaaacgaaacagactgcttcacaaccaaacggactccgacccgatgggtacggtagcgaacctttttgatgtagccatggtctttgccgtcgcactgatggttgccctcgtcacccgcttcaacatgacggaaatgttttccaaagaagatttcactatggtgaaaaatcccggaaaagagaatatggaaatcattacgaaagaaggacaggaaatcaagcgatacactcccagcgaggaacaggaaacttccggcaagcgagggaaaaaagtcggtgtagcctaccaactggaaagtggagaaattatctatgttccggaataacaatagacatccgtcaccctttgaataaaagttaaagagtccatacctataaacaagggtttttaacaatagaaatacccatcagtgggtattttcttaccctcatcttccccatatctttgcatttccaaacaaacgataattttatgataaagcaaagattcttaacgactctcttaatgggaagtatcgctgccggtgcatgggcacaggctgataaaggtgaaacttccgtagataaaactgtggatttgaatcctgtagtagtaaccggtacgggtacgcatcagcgactgaaaaatactccggcaccggtatccgtcatcaccgccaacgaaataaaacgtgccggaatcacggatttccaacaggccatgaccatgatggttccttctctctcattctccccgaatgccatgggttcgtatctgatgatgaacggactttccaataaatacgtactgatactgattaacggacgtaaagtgacgggggatatcagcggtaatatcgacatcagccagatagacatgagccgtgtgaagcgtatcgaagttttaaacggcgcagcttcttcgctctatggttcggatgcgattgccggtgttatcaacatcatcaccaaccagccgaaagatgaaatctccttcaccaccaacagccgttatacaagaaagaatcagttttcacaaggtctcaacctggacattgccaaaggaaagctcgcctcttacactgcttataaatacgatcactcggaaggctggcagaacagtggcctgactgtagacaagaatgatgatctggttgaaaccctcgatcagctttccatcggctacagcatgaataacttttcgcagcaattcaactatgatgctacggataaactctcgttctatgccaacggcggatattattggcgcatgaccgaccgccctgccaaacgcgacggcatgacaggcggaaatgattataatacgcattacgaaggctacaactggggtacaggagccaagtacagactgaataaacgttcctccatccagttggattatgtaggcaacaattatacttcgcgctacaaatacatgctggcagccggtgattaccaaccgggtgactacgcattcaccaaaagacagaagttccatgatgccgaactgaaaggtatcttcggtttcaccaccaacagtaccactgtcttcggagtggactaccgcaaggacattcttgttcgtcccgatgccgatgtagacaagggagtatatactttgtcgggctacggacagcatgaggtaaaactgtgggatcacttcacgggcattgtcggtgcacgctatgactatcatgaacaggcaggcggacgtttcaccccgaaagtggcagccatgtacaatattggaaacttcaacgtacgtgccacgtatgcagcaggtttccgtgctcccggcgtagacgaattgtattacagcatgttcaagaaaatgggtagcaaatacaccatctccatcggtgatgctgacctgaagcctgaacacagcaactactactccgttaatatggaataccgcaccaaccgtttcagtgcctctgttacgggatatctgaattatctgacagatatggtgtcttccaaagtaaccgcattcaatgatttgtccgctgaggcccagcagcaactgaaggaagaattccccgaactggcagacttatcatctaccaagaatgtaaacctgaaagaatacatcaactttgaaaaggctaccgtccgtggttttgaggtgagtttgtcaggcaatccgttcgccggctttacgctgaatggtaactatacctacgcttatgcccgcggtaaaggtgaagaaggctggcaaaatattcaacgcagcatccgccacactgcaaccatcagcggaaactatgcacattcatggggtgactacaccatgaacctcaacctgaacggtcgtctgcaaagcaaatgctactatccgggagatgccgacggagatgctccgggttacggtatttggaacctgaacacccgccactccttcgactgtttcagcagtttcttcctggaacccggtatcggtatcgacaatatcttcaacaagagagatatgagacctctgacgaagaacttcaccctgtactcaccgggacgtatgttggtggtgagtctgactttaaagctaaagaattaacgcataacaacttattattgatatgaagcatcttttcatcactctttgtttactgagtgtggctctcttctcctctgcacagggggagaagaccgccattctcattacccattacggaagttcggatcctgatacgcgtgcactgacgctcgacgtaatcacccgtgaggcaaaagaaacttttccgcagtttgaagtgcgcgaagcgtatatctctcccattgttcggcgcagactggagaagcaaggcgttcataaagacagtccggtagacgcactgctgaaactcagaagcgaaggatattcgcatgtactgatacagagtacaacactgattgaaggaagtgaaatgacttccgtccgccgcgatgcggagagcgtgaagcccttctttaaagaaataaaagtaggtaatccattgctttatacagtggaagattgcgaaaaggttatcgaaattctgacacaggaacagcccggaaagaaagaggacgtcatctatgtgggacacggcaatcaattgccaagtaccgccacttacgccatgctggactatatgatgaaagcccacggactgaaaaacttccacgtcagcaccatcgagggttatcctacactggacgctacactggcacagttgaaggagacacgcccgaaacaagtgacactgataccgttgttgctggtatgcggtaatcatacaaaagaagacatcgtcggagtatggaaaccggaaatggaaaaggcaggttatcaggccaatgtccgtatgcagggactgggcgaacaacccgctatccggaagttatatatggaacacattgaggcgttgctgaaatagctacaccctttccctcttatggctacaccttttgccccggatggctacaccattccaggcaaagggtgtagccctttttacacccttttatacccgaaatttagagaatagaatgtatctttgcatgatagaaatataagcgatatgaaacagccaaagataatagttgccggcatcggaccaggcagcgaacaagacattacgcctgcggttctggaggcggttcgcgaagcggatgtagtagtgggatataaatattatttccgttttatccagccttatctccaccctgaaacagaatgtatagatacgggtatgaagcgggaacgcactcgtgcggaacaggcatttgaattggcggaacagggaaaaactgtttgcgtcatcagttccggtgacgcggggatttatggaatgactccgctgatttacgagatgaagcgggaacggaacagcaacgtcgaagtaattgccttgccaggtatcagtgcttttcagaaagcggcttcactgctgggtgctcctgtgggacatgatttctgtctgatttctctctctgatctgatgacaccgtgggaacggatcgagcgtcgcatccgtgcggcagccatggctgatttcgtaacggctgtatacaatccgaaaagcgaagggcggtattggcaactctatcgattgaaagagctgtttctcgcagaaggacgcgctccggagactccggtaggttacgtacgccaggccggacgggatgaacaggaagtgcatctgacgacactcgctgatttcaatcccgaagaagtggatatgtttacggtcatcctgatcggtaactcgcagtcttacgcgtggaacggcaagttcattactccccggggatattataaccgtccggataaggatgaacaaccgactaaggggataggtcaggacatcatgatacaaagtttccggaccattgagtcggaactaaagaataagaatattcctctggatcataaatgggctttgctgcacgccatccataccacggctgattttgaaatggaaaagctgctgtatacggacaaaggtgctgtggaaaagctttatcagaaaatagcggacggtcggttgaaaacgattgttacggatgtgacgatggctgccagtggtatccgcaaaggagctttacaacggctgggggtagaagtgaaatgttatctttccgatgaacgggtagcggcaatggcagcggaaaaagggatcacccgtacacaagccggtatacgtctggcggtggaggaacatccggatgccttgttcgtattcggtaatgcgccgacggctttgatggaactttgtgatctggtacgtaaagggaaagctgcaccaagcggtattattgccgcacctgtgggctttgtacatgtacaggaatccaaacacatggtgaagccgttcatggaaatacccaaactgatagtggagggacgaaaaggaggaagtaatttggctgcaacgctggtgaatgcaatcttgtgctacaatgatgcggaacagttaaggccgggacgggatgtgtaaatagatacgctatgatacgaaactttatcatcataggcatggacgacaaccgggaacctttcttcccgcccgaagtgttgcggcacatccgggaaggaaaagttttctccggcggcttgcggcatcgggagattgtagagaagttacttccggaaggtgcggaatggatttccataacagttccactggataacgtctttgcccaatacgaaaacatttttgcagactttgagaaaactgcttccgatgcatctattgtcgtatttgcatccggagatcccctgtttttcggcttcgccaatacggtaaaacgaaaactgcccgatgcaaaaatacgcctctacccggctttcaattccctgcaaacattagcgcacagactggtgatgccctacgacgatatgcgtaccgtctccctgacaggacgcccgtggcaggaactggacaaagcactcatagaacgtgcccacaaaataggtgtactgacagatcgggagcatacccctgccactatcgccgcgcgaatgttggaatacggatacaactcctacaccatgtacgtaggcgagcacctcggcaatcccgaacgcgagcgcattcgccggatgagtcttgaagaagccagaaaaaagacatttgagcatccgaataatttgctgctctgctacgatacccgtagacagtcagctacgacacccttagacgatcagctacggcacccgtatacggtcagctacgacacccatagcaaggaagctctcctccctatagataggcagccctccataactgaacagccccgccccttcggtcttcccgacgaacaatttgcccacttggacggacgtgtccgcatgataaccaaagctccgatccgcctccttaccttgcagacattggaactgaatcgccgccgtgttttttgggacataggtttctgcacaggctctgtctccatcgaagcccgcctgcaattcccgcatcttacggttgtttcgttcgagatacgtcccgaaggagaagaactgatgcgcatcaactcccaccgtttcggtgcgccgggaatcacatccttaatcggagatttcctgcaaactgatctggaacctctcccccgccccgacgctgtctttatcggcggacacggtggaaaattagaaaatatactggtacgcctgaaagaagtattgcagcccaacggttgcatcgtcttcaactccgtgtccgaaagtagtaaagagctatttcgtcaaggagttcatgccgcaggaatgaccttacattcctccctgcgtatcatcatcaacaattttaaccctatagaaataatgaaagcaacgatatgaaaacagctatccttttagtaacaggcaacagcctcagcctggccgagacactgcaccaagaaatgaacgactccgaaatattcacactcgaacattttcccggttgcacttatatctcatccctttccgatttcatagaagagaatttcgacgaatatgatgcattcatcttcatttgtgccatgggcatttgtgtccgcaccattgccccccatgtaaaagataagcacaccgacccggccgtgatctgcgtggacagtatggggcgcaatgccatatccgtattgtccggtcacatcgggcaagccaataaaatcacccaagatgtcgcccacatcttaggggcgaatcccgtcatcagtaccttgagcgacaatagtggattatgggctcttgacaccctcggacaagagttcggttgggaggttttggtaggtatgtcgcacgcatactataaaaatatagaactcctcgacgacgacgaagaagaagaaagcgatgagggggaagattacaatgaagaagaagagtacggcgaagatgaggatgaggaggaagagtacgacgaggatgaggaggaagagtacgatgaagatgaggaggaaattgaggatgataacagtatcatacttcaaatgagggacggtaccaattacaacgagagaaccaaggaattcaacgtcatcattaacctcttcgtcaacaaataccgtaccgccctgttactcgaaatccgcgatgaaggtactgactacctggaacgtacccgcccccaacacgtcgacgtctattaccatcgcagcgacatggatctcagccagtacaaactgctgattatcgtcagtccctttatgttcttcgaccccgcaatagcccacatacagtttattcctaaaatattgcatgtcggcctcgggctcgcactcgatccccccgaattcgaagaactattcgtcaatctcgttgtaggcgcacccggtaaaaacatctgcgggcaagccatcaaagaagtagccaccatcgatgtgaaacgcaacgtagaagtgataaaaaaattacagaaactggtcgacgtccgcttctatacggccgaagaactgagccaggtagaagttcccaatcccagcaccaccgtacaaaaatacatgggcacgcccagtgtatgcgaagcagcggccatactctcatcgcatcacggtgtgctatatgccgagaaattcaaaggcctcagcaataaatccaccttcgccatcgccatcgagaacggatacctgcgtcaagggcacatcgaaatcgtcggcgcaggtccgggtgatcccgaccttatctccgtgcgtggaaggcaaatgctggagaaggcagatcttatcctctacgccggcagtctcgtcccccgcgaactgacattctgtgccaaaccgggtgctacggtacgcagttcggcttccatggacttagaagaacagtttgcactgatgaagaaattctatgatgaaggcaaattcatcgtccgcctgcatacgggcgatccctgcatctacggtgccattcaggaacagatgaactatttcgaccagcatcacatgagttatcacatcactccgggtatttcttccttccaggctgctgccgctgcactgaagtctcagtttaccattcctgagaaagtgcagagtatcatccttacccgcggcgaaggacgcacccccatgccggaacgcgaacaactccacctgctggcacgctcgcaaagcaccatgtgtatcttcctcagcgccggcattgccgaacaggtacaggaagagctcttacaagaatatcccgaaaccacccctgttgccgtttgctaccaccttacctggaaagacgagcgcatctatcgcggagaattgaaggaccttgcaaagattgtgaaagagaacaacctgacgctcactactatgattgtcgtaggtgaagccatcgacaatcgcgaaggcctttcccggctctacgcccatgagttcaaacatctcttccgtaaataagaagggagtgataaggtgataatgggatagggtgataatgggataacactccgtgatatataatacagctacttatcactttatcaccctatcacattatcactttttgttcaactaaaacctaaaaacaatgatattaatattaggcggaaccaccgaaggacgtatcgctgcccgtacccttgaagaatctggaaaaccattttactactctaccaaaggagacgagcaggaagtaaccatgcaccacggtatccgcctgtatggtgccatggacgaactggacttggaacactgttgccgggaacataacattcaattactggtagatgccgcccacccctttgccatacaactgcaccagaccgtagagaaagtagctcataccctgaacctgcttgtcatccgattcgaacgtatttatccgccacgcgatgaagaacacatcacctggtgcgatgattttgaagatgccatccggcaaatcaggaaagaagatatcttcaccctcctggcactgacaggcgtacaaagcattgccaagctaaagcccctctggcaggaaagtacctgttgctacttccgtatccttaaccgtgagagctcccgccgcctggccaaacgtgaaggttttcccgaaaaatatctgcattactaccatgcaggcgaagacgaacgcatcctgttacagcgacttcaccccgaagccatattaataaaggaaagcggactttccggaggattcaatgaaaaagtggaagctgcccttcaggaaggtatccgcatttttgcaatccgtcgtccgccaatgcccggaagttttatgatagtgaacggtgagcatggtttgcgccggatgattgaaaaacattttccagatttttatcctttgcgtagtggtctgactacgggtacttgtgcagccgcagccgctgtagctgcaacctgggatattttcaacgttcaacgccagccccgacccgcagaattccccgttattctccctaacggagaaaccatttatgttcccgtcgaagagcaagaactctacccgcatcccagctgtgtgaacgatgactggatgctggaagcagatgccactgtcatcaaagatgcaggtgatgaccccgatgtaacaaatggcatgcagatcaaggccaatgttgccgtgcctttccgttttgacgatccaacacccgcagaacttggtgctgatgattataccgttatcgtctgtggaggcgaaggtgtaggcattgttaccttatcgggtttaggactggaagtgggaggacctgccatcaacgttactccccgcaaaatgattgaaaataatgtaaaggcatgccttcaacgacttggcatttccaaacaacccaatccatttgccgtcactatttccgtgccgggtggcgaagagatagcccggcggacttttaatccccgtctgggcatagaaggcggtatttctatcatcggaacttcgggtatcgtgaagcctttctcttccgaagcatttgtagattccatccgcaaatctatggaagtaggtcgagcaacaggaagcccgcgcatcgtccttaattcgggtgcaaagagtgaaaagtatgtccgggggtattatcccgaactgcctgcacaggcatttattcattacggaaacttcattggagatacgataaagattgccgcagatttggaaatcaaagcggtgactttgggtatcatgataggaaaagccgtgaagttggcagaaggcaatctggatacgcacagcaaacaggtgacgatgaataaggatttcctacgtgaagtggccctttctgccggatgcggaggggaaacacttgcagttatcgaaaagataactttagcccgtgagctatggacattgctctctgctgaagatttgcaagctttttgctctcgtttgctcgaactgtgccatcaatattgtgacccgttgctaccggaaggagaactgacgattctgctcattagcgaagaagggaaaataattacatagaataaaaaaacaagtcttacatgtagtctatcaggctgaaagccctacgctatataatgaaagcccttcaggctatatgcgaaacttaaattaaaaacctcaaatatgaaacaccctcaaataatcctcgtcaccggcgcttcttccggttttggaagagtcattgctacgcagttggctgcacaaggacatatcgtttatggctccagtcggaaagcagtatccaataatcccggcttcaaaatgttgcaattagatattactgatcctgcatcagtatccaatgccatatcgacaattctgaaagagcaaggcagcattgatgtacttgtcaacaatgccgggatgggtatcagcggagctatcgaactcactaccgaggaagagatacaacgtcagatgaatacgaatttcacaggtgccgtccgtatgtgtgcagcagtactgcctttcatgcgcgaagccggacacggacgaatcataaatatcagttccattgcaggcgtccttgccgttccctttcaggctttttacagtgcgtccaagtttgcgattgaagggtatagtgaagcgctttatcaggaagttaagccactgggtatacaagtttgcgtagtcgaaccgggagatttccagactggtttcacagcgcagcggcaagtgagccagacttccctctcccatgcgcaatatggggagagttttgcaaaagccatgcgaaatgtagagttgtctgaaaacaatggttgccgaccggaaaagttaggcaaagcaatctgcaaactggtaaatagccgccgccctgctttccgcacaaaggtcggtccatgggaacaagtattctttgcacgcatcaagcctatgctgccgtttagtctggtagattggctgatcaggaaattctattaaatgataatccgactacataattgtatgtaatcatataatttatatctttgcgagcaaataaacatcacccccttacaaggttcaagtaatgaaacagactattctcactattttctttgcaatcatagcattgggagcaaatgcccaatcccctatctcctttcaggtaaaagccggagtcggtacctccaacttctatggagaaaatgtagaaagtgatacacgcatcgcctacaaagtaggtgtcggcatgaactatgagctcaaccgcacatgggtagttcaaccgtcactgaactttgtatcgataggtgcccgtgaagaagtggaatatgtaggcaaagtaaatatgaacgagttgtatatccagctccccatcatgatggccgcccgcctcaaccttggaaagaattacagtgcttccctaagtgccggtccgtatattgcctatggtgtaggaggaaagacatccggtgagatggaggaatatgattacagtagtgaatacaaccctaacagaagctacagattccgcatagatactttcggtaaccggatagatgacaaaatgggaaacaaacgcttcgacgccggccttatgttcggcctcaacatcgaatatcacaaattcatattcggagcagagcttcaattaggaatgatcagggtaaacgaccagctggataacctattgcaatcatccggtattgagaaattctctcccaagaatctcgcttcgttcttcaccataggataccggttctgatttacaactgctccgcctgctttcgtttcatttcattcagtacactgcatgtcaacggtatggcaagaatgaacgttagaagatcagcagtagcctgacacatttccacaccctgcaaccccagatagtgaggcagaataaaaatcagcggaataaagaacaatccttggcgggcagaagaaataatggtagcctttaccggtttacgaatcgtctgtaacatcatattgctcatcacaatccatgaacccaacggaaaagtaatgaactgccaacgcaaggcagcagcacctactgcaattacatccgggtctcccttacggaacagagaaacaatctcttctgcaaatcccatgcctgccagtgcacacaccagtaagaaaatgaatcccacctttacacaaaaccagaatccctgacggacacgcgcatacaatcctgcaccgtaattgaaaccgcataccggctggaaaccttgcccaaaacctatcagaaatgcattaatgaacattgcgatacgggtaacaatagacatgcctgcaatagccgcatctccataagccccggcagccacattcagcaaaatagtagctatactcgccagcccctgacgggcaagcgaaggagtaccaccaccgataatttcctttatgaaagccagtgaaggcgtgaagttcttgaaacggatacggatattgcccccctttctgcacatatacaacaacagggagaagctacatatctgactgatgaccgtagccaacgcagcacccgatatacccatatcgaagacaaaaatcagaatagggtccagtatcacattaatcaccgcacccgatacgattcctaccatcgcatacgctgcatttccctggaaacgaatctgattgttcagtactaacgaagcagtcataaaaggtgcacccagcaatatgatgcccagatatttctccgtataaggcaggatagtaggtgtagaacccaatgcaagcgacaacggggtaaggaaaataagtcccaccactgccagaaatatacccataaacaacgcccagaagaaaccggtagccgccatcttctctgcattcccagtctcctgagcaccgagtttccgcgaaatatagttccccgaaccgtgtccgaagaaaaagcccaccgcctgaattatggacatgaccgagaacacaatacctacagccgccgtcgactgggtattgatcttccccacaaagtacgtatccgccatattatagaatgacgtaaccaacatactgataatcgtaggtacagccaatgatactatcagacggggcaccggggtggtagtcagatagagataattatcttttgtcgaatgtctcataaaattttcacaatctctgcaagcagttcatcaatggtttgcacagtcaccgcttcgccgtttaccgggtgcagtacaaaagtaccgtcccctttcaaatttcccgtttcaatataaacgtccgactccacgtttcggtttgccagaataccatttctttgcaaagctttccgcaccatagcatatttttgtccatgcccgacaatacggatctgggaagtatactcattgttcacccggaataatcctgtctccagatcaaacacaattcctttacgggcaaagaaactactgagcgttccatccagtgaaaggtcttcgggagttccgatagtcaccccgttcgccttatccatcaaccagattttatccgcaatctgcaaggcaagttccaggtcatgggtagacaggaaaatagtcttatccgtctgccggctcaactgatggagcaattgcatcatttccactttactcgggaaatcaagaaaggcagtaggttcgtctaggaaaatcaccggagtttcctgagccagtgccttggcaatcatcactttttgtcgttcaccatcactcagtgtatgcaccatgcgatgtgccagatgagatattccgaccaggttgatagcatgatccactacctctttatcttctttggagagtgttccccagaaaccggtatatggactgcgtcccagaccgataagttccacagaagtcatattgcggatgtcgcacttctcagtcaggactacactgatcacttttgaaagttgtttgtccgtataagagccaatctcttttccctgtatacgtatttcaccggacaacttcggttgaaatgcggaaagtgtacgcaacaatgtagacttccccaccccgttggcacccaacagacaagtcaactccccgctattgattccggcacaaatatcgcttgccacgactttcacatctcctttaccgggatagccaatggatagtttctcaatatgtatagtttcctgtttcaagacctctttattttcaattctcaattattcttccagttcccctttgcgcttcctgaagagcacggatgccactaccggagcacctaccaaagcagtcaccgaattcaccggtaaagctccttcaaatcccggcatacgggctatgaggttgcacaccaacgccaacgaagctcctaccaacaatgtggcaggcatcagtatccgatgatcggatgtatgaaatatagcccggcaaagatggggaacagccagaccgataaacataatcggaccgcaatatgccgtcacaatcgctaccagtacacctgaacaggagatcaccaacaggcgtgcccgcttgatgttcaaccccaggttccgtgcatacccatcgcccagcagcaacaggttcattgtctttatcagcagaaacgaaagtggcaacaagaccgccatgatacagacaaacagtatcatctgatcccccgacacacgggcaaaactacccagtccccaaatgacgtatgcacgaatatcttcctccacactgaaatatttcaatacgccgataatggcacttgccacataaccaatcatcacaccgataatcagcagcgtcacatttccctttactttctgtgaaacgtatacgataagcgccatcacagacagtgctccgataatagctgcaatggacaacgccacttctcccatatatccgagcttgctcaatgccacaccgcccatcgctcccgatagcaataccacacaagctactcccaggctggcacccgaactgatacccaacactgacggtcctgccagcggattccgaaaaaccgtctgcatctgcaaaccactcaccgatagccccgctcccgccaccaatgccgtcaatgcctgcggcacacgggatttccaaatgatattctgccagataatggattcatccgtattcccccataaaatgttccagacggaacgaaaaggaatatggacagagcctaacagcaggttcagcaagaagaacagaaatatggatgccagtatcaccaacatcaagagcagtgtcggtcttttcattgcaaacgtgcgtagtatttcggttggtaatcaggtaataaatcggggtggaacgcatggagcagatcttccagtactatttccggttccatcggcatactttcgtagaaaggttgctcgcgcatattgcaataaataacgcctttgtcacggaatgcacggaagtcggcataacggggatcaagggacttcaaagcatcataagagaatgtaccgtcgtaactattcacaatacgccagtaatcggcactctccgcctgactgtatactgtttcaaaatccagtgtaacaccaccggaacggggatcgtctttcaagaagtaatcggctcctgcatcacggaacagttcggccaggaagcttttaccacctactgcataccagtttcctccacgtatctcaccgctgaatactaccggacgcttcttcacatcagcagccagttgtttcaggtcgttataatgcttctctatagcagcaaatttttcatttgcctcctcttcctgtccaataaacaaaccgatgaatttaatccattccgcctgtcccagcggagtcatttccttatatcccaggtgcggaaccaaaggtattccgatttcacgcatcgtatcatatccgccacgcttgaaaggagagataaagattacatccggattcacactcatgatcacttcattatcaaagttaccttcaattcctattttagctgttttaccagatttcaagcgctcattcatttctttgttgaacaaatggcgtgtactggttatacccaccactttatcgcaggcttccagtttgatgaaattggataattgtaaagaagtcatgcaaatggcactgcgtaccggtgtttcaatcacggcataatcagaaggaattccttcgggttttgttccccggggcaccaatgcataatggaaagtattactactttcattttgaggatcgcgcaagtccaccaagcggacatgattggggagatatttcacttcaaacccttgggcataaaccggataaatagagtctgtggctgatacggaggctgtggtagcctgtaaatcagtagagttttgtttgtttttcgggccacaagctacacataaaatacttaaaagggagacagttattgcagtagttcgtttcatgacaataaaaaggtatagaattcgagcacaatattcgtcatttttggggagatacgcaaatacccgtcctgtaatttaaccgaatttgtgcccgaacacctcttatataagaatgtctaaaaattcatcagatcattcaatgcttcgctcatgctgggatgtgtaaatatataatcacgcaagaaagtatattcctgtcctgttttcattacaatagatacgatattaatgatctcacttgtttccggtccgaacagggaacagcccagaatcttatttgtatcggcatccactactaccttaaacaacccgtcagtctcacctaaagtacgtgcccgcggaatggctgctacgggaagtgtattcacctttatgttcagtcctttcttacgggcttccgtctcactcaaccccacacgtgccaaaggagggtccataaataccgaataactcacaggctcacggtcacctgtacgccgttctcctgcaccaaataaatcctcacggataatgcggtaatcgtccaatgaaatataggtgaattgtaatccgccttttacgtcgccaatggcacggatggccggattagtagtacgcagccattcatctacaataatggccccccgttcattcactttcacgccggcaacttccagattcaaccccgaagtattcggacgacgccctgttgccaataagatagcatctccttccagatgatggatttcatgagttacagcatcctcataaatcactgttgcaccgtccacggattgtacctttgcgttgagatggaatacaatgcctttcttttccaacacggtctgtacgctggcggcaatatccctgtcttcgcgcccaatcagttccggatacccttcgagtaccgtcaccttcgaaccgaaagaggcatacatggaagcaaattccaggccgatataacctccacccacaatcacgagtcgttcgggaagttcttccagttccatgatggaagtgctggtgtatacgcagggattctcttttattccatcaataggtggtacgatggtttccgcaccggtatttataaagatctgagaagactgcaattcaattactcccgtctccgtccgcacttctaccacatcaggaccggcaaacgatccgacacctgtatacaccgtcacattaggattatcagccagattatgataattcttattccgcaggaaggaagtcacctcttctttacgaccaatggcctgacgataatagtccttcttctcttcccacgtagcctttaccggagtttccttagccagatgtaccaacgtctttgtaggaatacagccgatattgatacacgtgcctccatacatacgatctgaacgttctactatggcaaccgtcttctgacgttttgcaaattcggcagccagggtcttcccacccttgccgaaaccaatgataatggcatcatactttttcatatctttatttttttaattgttccagtacgctcttcgcactgtctgctaatataacaattgcgccggccaaaatggctgtatcttttataactaatcttcctgcaccggtcaataaaggaaagccgaactcgccactgcccagattaggcacccatacttcgggtgtggtgacaaggaaagaaagcgttccgagagtcatgataatagcaagtcccgcacctaccagtcctactttcggccaaaagatgccgaggaatgtaaggataccgatgctcataataagaatacccaatccgtgagaaaaaccatacgtattattctccttgtgccactcatgcttcacggtatcaaattctccttctttcagcttatactctttatagtcgggagcatcgtgtgtatagaagaagctcataaaagggctgtttgccacaaaaggtacgatgccttccgcttcataattccagaacttcaacccgccgatccaaacgaaaataataagaattgatacacggataagattgatacctaacttttgagtagatgcagccagtgtcagggctgctacgaacatagattttaattttgtttccatacgattattgcattaatgaattgttttgtttttctgatgcaaaaatcggggtttatgtcggagcttgaaatggcaattctgccgtatcagttggcaatatttcccgttgtgttcaatttacggaaatcggatacactttcaccggtcattttcttgaaaaaacggctgaaagtggacaaatcctcgaaacccagcagttcgctgatttccttggcgcttttaggggtatagagcagtaatctcttggcctccgactctatccgttcatggataatgcgtagcggggaaggtactccgcaggaggcaaacaaattggagagtgtctttggggaacggaataacaggtcggcataatcctgtacctgcttcttttcgcggaagtgctggtcaaccagaatataaaaacggcggacgatatcaaaggctttttcctgttccggcgtgacgccacacttttcacgggcaatgcgggtgcaggtgataataaaacgtttgagaatgatacgtaacatttcctcttgcagattatcgcgaacggcggactcctgccggaagatacgaataatgtcattcaggttggcggattgttccggcgaaagtttcagtttcatcacttgggaagaaccatgaaaaaggaaaccgttacaggatacttcgtcatcatgaccgaatatacagtagaaattgctgttgaacaggaaagtgaggtactctccctccaccgatttaatttcaatatgctgcaaaggagtaagacttatgatttcgtcctgttccaactgtatgggaatatggtctatctccagagtcaaatttccactccgcacccaaatgaacttatataaagtagtatcctgttgcagtgctttattttcgtggaaacaaaaggtcattgccaagttcccgttcaggcgggtatttaattgataatctatcatgatatgatttcaaaaagtgagaagaatttaaatagtttcctctattttccagtccttcagtgtctttcgttcgccatcgaaattaatgcctactttcactaccggcaatccacataatgcaaagcgttcgggataattcttcagatttatctgattcatggcgacctctgcacttcggtccagctttaactccatcacatagagcgtagtctgtgtacgaagcactatatctacgcgaccgcgaggtgtacgcacttccacatccacataatagccaagaaggctgaaaatgatgtagaacatctgctgataatgtccttcataattcgtgttgtcgcactgcggaatagtagaaagaaatgtttgcaacatctgcaaggcctcgtccatccgcccgttacgaatgggaaccgacatcttggctatcatcgtgttggcgttctgcgtgtaccgttccacataattgggcagcaagctgcgcatcaggccgatacgaacttcctgattgggcatatcgagcaaataaagatcagtctccttatcgtgatttttgatggtgacatagccactttgataaagcaacggagtggcgttttccattcgttccgtgggagcgtcaaaatcagaaggaagaacctcttcaccccctattgtggaaggaagaacatcaaatttattcagcatttcaatcagataggtgggcgtgccgctaccgaaccagtaagagtccattttaccgtcggcaaaggcattcaacaagctgaagggattataaatatcgggcgacggccaggtgaaatgataaccgtcataattgcgcttcaactgtgcaagagcttgctcgcggggcagttccatgcgtgtggccagccaatcgatgtcactatccatctgtgtcaacatctcttcttccgtaatgccgcaaatagcggaatacgaactatccatgctgacatttttgatattattcagctcactgaaaatggtcaactgggagaactttgtgataccggtcaggaagacatagcgcaaatagggatcacaggctttcagcgggctgtagaagttacgcatcacattccgcagaacaggcagattcctctcttcgtgaaccacatcgagaaggggagcgtcgtattcgtcgataaggacgacaacctgccgaccggtctgctcaaaagcacgttgtatcaagccgtacagacgttggttgggttttatttcatccgcttttcccactccatatatttcttcataaatcgagagcttctgactcaactccaattctaaatcttctctattcagatgtttggccgtactcatgtcaaaatgcagcaccggatattgcgtccattccgcctccagcctctcaatagccaatccttcgaacaaatctttctgcccatcaaaatagctatgaagcgtagacaccagcaatgatttgccaaaacggcgcggacggctcaggaataggtatttagaatcggaatgcgtcatgcgatacatatattccgtcttgtcaatatacaggtaattctttctgcggatttccgagaaagtctgtattcctatggggtaaagtcgttgttgcggcatcatgtctatcctccttttttgtacatcggttcactggcaaaggtacaacatcaataaatattttcctaataaaatccgcataattagaagttcacggacatagtaagccatcgccaattaccggtatccctgttttccattttccagttgaacacatagccttttaatttcaagcttgtcacattttttatttttattaaatttagaaacacgacataaatacagaaattagtagctacttgcaaaagaagggaactttattttaagttcatcatcaataataaatcgaaacaaaaacaagcaccctattaataaccgtaaacaacgtttttaaagaataacaggaacgtttttaaagaatgtacccaacgtttattaaaaacgtaaaagccatactaatgagctaaagaacgataaatatcaacaaaaaaggcgataatccttatcaaggaagtatcgcctttatcgtttttcacatgttattattccggaaatggatttccctaatccccaatgattaaattatattactaaaacaagagaaccggcagcaataatacatatccgccaaagtccgggaaagaaaaattagattttgtcatttgccaagttttttaggtttactattaaagttatgttctctccaaagccctacaaatatactacatcaggaaggcgaaatcaagtctttcaaccgttttttccaacagttttcagactttacatgctaaccttttctggtacaggtcatttgcttcattgatcggcagacaagtatattgatagcatcaggttggcaagcaggctattattgcattcggttcattaaaaagtaccgttgcataagagcgtttgactttagtaagcaagaaaagatagataaacaagaaatcgggttttattttgttttatattcagaaaatccccaattttgcactccccataaaaattattatggggggtgcttatcactaaacactaaccattaatcactaacaaaatgtccaaccccgtcatattcgtatccctcggtcccggcgaaccggaacttatcaccctgaaaggcttgaaagccctgcaaagtgccgattgtatcttttgtcctgaaactcgcactacaaacggacggatattctcgcgtgctgccgatatactgcacgcgctggatattccagataccgccctctcccgctttgcattgcctatgagcaagaaacgggaacaggctttcgcagcttatgataaagtatatagcgaagcttcccttcttcataaagaaaataaaaaagtctgcatcgttgccgaaggagacgcaggtttctattcttcggtacactatatctttgagaaactacaagccgacaatattcctgtgcaacacattgccggtatccccgccttcattgcagcaggtgcctgtgcaggacttcacattgccagccaggaggaacgtctgaccgtcattcccggtatcattaccgccgaagaaatagagaaatatatggaggaaaagactactattgtcatcatgaaactttctcaatgtaccgaagaagttcatcgttgtatccatctccatcccgaatataactatcattatttcgagaatataggcacggaaaaagagaaatacctgcatgatacagagctgatttcggcactctctttcccttatttttcactattaatcatacgccacagcaccttctgaggcgcatttaatactatttcgcacatcattggattaattttcacaaaaatgccttacctttgcccactgtgtaatacaaaagatttatagacatgaaaagacttacattgtatatgtttatgctcgtactgagcattggttacgtttcggcacaggggaaagctgatattaagtttgataagacctcacataacttcggtacattttcagaaaatgatccggtagtaagttgtgtattcacattcaccaatgtgggcgatgctccgctggttatacatcaagccgtagcttcctgtggatgtacagttcccgaatatacccaggaacccgtattgccgggcaaaaccggaaccgttaagattacttacaacggaacaggcaagtatccgggacacttcaaaaagtccatcactttgcgcacgaatgccaaaacagaaatgatgcgactctttgtagaaggagatatgacaccgaaagatgcaaaataagcatctttatatataagaataaaggagaatttttcaattctcctttttttttgctttctttgaagctgatttggataaaataaacaattaattgacgacataataactataaaacataaaagcaattaagaaactatgaaacaagaagaagagaaattgaccggtctaccggaaaatgcattccgtgaactgaaaccgggcgaagtctacaacccgttgatgagccctgacaagaagtacccggaagttaacctttggtctgtattatggggtatcgctatggctatcctcttttcggctgcggcagcctatctgggattgaaagtaggacaagtgttcgaagcagccattcctattgcaattattgccgtgggcgtatcaggcgcagccaaacgtaagaatgcgttaggtgaaaatgttattatccaatctatcggcgccagttccggcgttatcgtagcaggtgccatctttaccctgcccgccttatacattctacaagaaacttatccggaagaaatcacagttactttcacccaggtattcatcagctctctgctgggaggtgtgttgggtattctcttcctcattccgttccgtaaatattttgtaagtgatatgcatggtaagtatcctttccccgaagcaacagctaccacacaggtactggtatcgggcgaaaaaggcggaagccaggccaaaccgttgttgctggcaggtattatcggaggtttatatgacttcatcgttgccacattcggctggtggaacgaaaatttcaccacacgtgtatgcggctttggtgagatggtggctgataaagcaaaactggtattcaaagtgaatacaggtgcggccgtacttggtttgggctatattgtaggtctgaaatatgcttctatcatctgtgccggttcactggctgtatggtggattatcattccgggaatgtccatgatctggggtgacagcgtgctgaaccagtggaatccgtcaattgtggctaccgtaggcagcatggctcccgaagaaattttcaattattatgccaagagcatcggtatcggcggtatcgctatggcaggtatcatcggtatcatcaagtcgtggggcattatcaagagtgctgtaggactggcagctaaggagatgggtggaaaatccaatgtagaagccagcatgaagcgtactcagcgcgatatttctatgaagattattgctatcggttctattataacgctgttactggtattcttattcttctacttcgatgtgatgcaaggcagtctgctgcatactgtggtagctattctgttggtggcaggtatcgctttcctgtttacgactgtggctgccaatgccattgcaatcgtaggtacgaacccggtttccggcatgacgctgatgacattgattctggcatcggtagtgatggtatctgtcggcttgaaaggtccggagggaatggtggccgcattggtaatgggtggcgttgtgtgtacggcactgtccatggcaggtggtttcattactgacttgaaaatcggttattggttgggtagtacacccgccaaacaggaagcctggaagttcctcggaacgattgtttcagctgcaaccgtaggtggtgtaatgattatcctgaataagacatacggatttaccagcggacaactggctgctccgcaagctaatgcgatggcggcagtgatcgaaccgctaatgaatggcgtgggtgctccctggttgctttacggcattggtgcagtacttgctatcgtattgaatgcattcaaaattcccgcattggcatttgcattgggtatgttcattccgttacagctgaacattcctctcgttgtgggtggtgctgtgaactggtacgtaaccagccgtagcaaagatgctgctctcaatgcagaacgtggcgaaaagggtacgttgctggcatccggtttcattgccggtggtgcgcttatgggcgtagtcagtgcagcaatgcgtttcggaggtatcaacctggtgaatgatgcctgggtaaacaatacgtggtcagaagtactggcattgggtgcttatgcattgctgataatttactttatcaaggcttcgatgaaaaccaaataatagaaatacaatgagaacgattttatttatcacagcactgtttatgtcaactctgctatctgctcagaagcccgttgagatacccttgtggcccaacggtgctcctaatacgaatggcctgacaggagatcaggaagacttggatggcggccgtgtggccaatgtcgttaatcccaccatcacggtttatcgtccggcaaagccgaacggcatgactatcttgatgtgtccgggtggcggatatgcccgcctggcaatgaatcacgaaggccacgacatggcatcctggttcaacacacagggaatcacgtatgccgttctgaaatatcgtatgccgaacgggaaccgcgaagtgcccctctcagatgcagaacaggctatccgcattattcgccaacatgcaaaagaatggggtatcaatccgaatcaggtaggcgttatgggagcatcggcaggaggacacctggctgcttctctctctacactttacagtagtgatgaaacgcgtccggactttcagatattactttatccggtaatctcgatggtaccgggtattacccatggaggttcgcgcaagaaccttcttggtgataacccgaccaaagaactggaagatgcgtattctctggaacgtcgtgtatctccccgctctccacaagctttcatcgtactttctgctgatgatggcgctgtgccgcccatgaatagtatcggctacttccttgctctcaaccaacaaaaagttcccgtttccatgcacatctaccccattggcggacatggctggggcttccgtgataacttcacttacaaacgccagtggacagaagaactggagaagtggttgcgtgacggggtgaaattcgagaaaaataattaatatatcaactcatgaaaaaattgacttttatcacctgtctcgtattactacccctcgcccttcaggcacaggaagaccgttacgaccagttgaccaatccgaagttgaccagtatcaacaaggaggctccccggagtacattcacttcttatgccaccgaagaagatgctatcgtcaacgaccggacgaacggagccagccgcctatccctcaacgggaaatggaagttcaactatgtggaaaactttgccgaccgtcccacagacttcatgaacgtgcgtactgaggtgaaccgttggccggacatcaatgtgccgggtaactgggaattgcagggcttcggtactccgatctacgtcaatcagccttacgagttctgttctaagggttacgaaccttattgggacaagcctaatccgccttatgtacccaaagactggaatccgacaggtacgtatcgccgcgatttcgttgtaggtaatgactgggatggaaaagaaatcttcctcagtgcagacggtgtgcgcggtgctgctttctattacatgaatggcaagtttgtaggtatgagcaaggatgctaaaactcctgcccgcttcaacgttaccgccatggtaaaaaaaggcaagaatatgattgccattcaagtacaccgtttctcggatgccaattatctggaatgtcaggacttctggcgcatcagcggtatagagcgcgatatctatctctatgccacgcccaaaatccatattgcagacttcaaggtagagactccgctggatccttattacaaggatggtatcctgcaactgaaagtgaagcttacgaacgaaagtgatattaagtctccttatgtagtttcctatcgtttactcgatgatcaggatcagcaagtaacccaatcctctacccgtgtggaaggtgatcagaatgaagtagaattcacgaagaaaactctccgtggtgtaaagcattggacagctgaaacgcctaatctttatacactcgtcatcagcctgaagcgcaccaatggtgaagtaatagaagctaccagttgcaaggtaggtttccgtacgatagagattaaggataagcaactgcttgtgaatggcgtgcctatccttgtaaaaggtgtgaatgtacacgagcataatgaatacacgggacattacgttccggaagatcttatgatcaaggatttcgaactctggaaaaagtataatgtgaacaccgtacgcacttgccactacccgcaacaggaacgtttctacgaactttgcgaccaatatggcatgtacgtaattgatgaagcaaacattgaaagccacggtatgggttataacctcaatgtaggtggtactttgggtaacaatccgttattcatgaatgctcacctcgaccgtaccatgaatatgtacgaacgcgataagaatcatccgtctgtaatcatctggtcactgggtaacgaagccggaaacggactgaacttctacgttacctataatacgctgaagatgctcgatagccgtcctatccagtacgaacgtgccggattagaatggaatacggatatttactgtccgatgtactcttctccccaatctattgaaaagtatgcccagaataaggaaatgactcgtccgcttatcttgtgtgaatatgctcatgctatgggtaacagtcttggcaacttccaggattattgggatgtgattgagaaatatccgatattgcagggtggttgcatctgggactgggtagatcaaggctttgccgccaaaaccagcgacggacgcaaatactggaattatggtggtgactatggtgataccggaactccttccgatggtaacttctgcatcaatggtgtagtttatcccgaccgcagtataaagccccagactattgaaatgggtaaggtttatcagaacattaaattcattaagttcgatccgcaaacctgcacggtgcagatacgcaacgacttctcatttactgatctgaataaatatgatttccattatgtcgttcgcgatcatggaaaagagatttataaaggtcagatggataatatcaatgctgctccgggtaagacagctaccagtgcattcctgcaaggtattcctaaagaaaagaatactacgggagatgtacgcatcgagttctatgcaaccatacgtaatgcagaacctttcttaccggttggtacggtaatcgcacgtgaacaaacttatgtgcacccgttctttaagaaagaagtggtacgcatggatcccgctaaagtagatgaagtcttttcacaggttgttttcagcggtgatgatttcaaggctacatttgataaacaaagcggcttgctgacctcttatatctataagaaacaagagtatatccataacggccagggcccgcaacctttcttctggcgtgcacctaccgataatgattacggagcaaaacttcccactcgcctgaaagcatggcgcgaggccagttaccagacacctaaggcagaatcgttcaatgtttctaaagatggtgacaagtctattgtaaaggttacctatcgttttccgcaggtagatgcgcagtgggaaattacctataaagtctttgccaatggcattatcaaagtggataatcgctttgtagccgaaggtacggaaactccgatgataccccgtgtaggtttgcgcatgcaattatcggaaatattaaacgaccttacttactacggccgtggtccggaagagaactatcgtgatcgtcgcacttcccagtttatcggagaatatactactccgataaaggacttgtacgaaccgtacatccgtccgcaagaaaatgagcatcgtacggatatttactggtgtgcactcaccactaaacaaaaagccggtttactctttattgccgaccgtacgtttgaactgaatgcttccaactatctgcttggaagtttggatagcggcgaaaccatcgacaatggtgctccacgtaccaacgaaacgaatcaccgtcacctcaccgacccacaacctgtaaaacaggtagatatgtttatcgactatcggatgatgggtgtaggtggtgataatagttggggagctatagcacacgaaccgtatctgattcgtcccggtgtagaaaatgccattgaatacggattctccatcgtaccatttgacaaaaaggcggattacaaaaatttaatctatcaatattaaatttaatctgtccaaattaaggattaatgaaaaggatgtcgtacttttgcgacatccttttttatttatattaataaacgaaagaacaatgaaaacaatgattaccctcctgttcagtgcgctttgtgtagctactgtcagtgctcagacagatgaaaaagacaacgccatgctgaacaatggaataaattttctggatattccttacgtagcacatacgttggaagttactgatggcgaagaagaacttatcattaattgtgatgaagtagattgcaccacctttgtagaatatactcttgctatggccctctctcctaccgaagacggacaggtagctgaaggcgattttgctaccaatctgcaaaagatacgctaccgtgatggaaaaatcaacggttatccttcacgcctgcattacattgcagactgggtaaacaatggtatccgtaacggtttcctggaagacgtaacaacagcttacagcccatacacccagagagtttctctttcctacatgtcttctcatccggaactgtacaagcagctgagtaaatctccggagaatgtagcaaaaatgaaagagatcgagaagtcattgaatggtcaggaatttcattatatccccaaggataagctaccgtttaatggtctgccttggataaagaatggtgatatcattgctattacaacgaatactccgggattggatgtggctcatatgggtattgctttctatgtaaacggcaaactgagtctgctgcatgcttcttctaaagaaaagaaagtggtggtttccaaagtagctttaggacaaatgctacggaataatgataactggacaggaatcagagtactaaggatgaagaaataaatcagagatgattatacacaaagggagttccgaatttttcgaactccctttttttgttacatcttcacgccaaccgtccccagcactaacctcactcctcttgccgcaataaaacaacatggaatgcccaccacacaaaccaatgccaatcgcatcaatggagagaccggcaaaagttccacaacaaatatgcaacctaccacaacaacaggatgaataaaataagccgcgtaactatcagtggacaatttctggaccaaaggcatcggtttgttccaatgagccttcccgtatgctaacagaaaatagcaaatacccacacacataacaggttcccaaagggcataaaataaagcctgcaaattccatccacccgagaataaatccatctgttctgaaaaactactcattacaatcaataaagaaggaatgccacaaagaattgctataagaaaccagggaagtgcattcttcacacagattttatccagccaatgattacgatgcgccacaattcccaacaaatacatacctatatataaaggaaagaaccccagctgcaatcctaaaacttcacttcctacaggaacataaagccgaatgaggaatgctgcggcacccgtcattagcataaatagaagaatacccattattgcaggatatttccaattcagtgccaactgctttgtacaaaaatggcgataaacagcataactaaattcaaaaatcaacagtgtaaatacaaaccacatcggtccaaaacccggtctaccccatacaccgtatatccaatatattaatagaggattgactagaaaactataaatcaaaagaggaatacccaaacggttgagacgatcgcatataaaagatttcattcctttacgatcaaaagaaaagggcatcagataggcagagataaaaaagaaaagactcataaaataggattggtcaatgcccatagatgctgagagcaatccttgagttaggccggtagttgtttccttcgatatgtaataccatccaccggaagctccgaaagcaaccgcagaatgatgatagaacaccagcatagtaaggaaaacccgtaataagtcaagataataaaaacgcgtccgattcatagtatttatatttatggttaattaaaatagcttggagatattttcaagaatatctccaagcccccagaagaactaaaataacaatctgttaccctcgcatcagcaattccgggaatgtaaatccttgcatggtatagcagataaagaagatggtagcactaacaatccacagaataagcaatgtccacttcaacccggaaaccataggttgccaattgaacaccggacggaagattgcgaaaacaaggctaaccagaggaatacccactacgaggatacctgcaatatatagtacgatggctgacaaaggagatgtaggtaatacaaaatcaatagccgggaaccaagacatcaacgctgcaccaccaccaatagcaactgcaatagcggcaaagagcaaagccacaaatacaataccgaaaacaaacagtaccggactgcaaatgatagccacaataatcagacaaatcttcaggaaccaaccgacaatcattaacaacgtatcaccggtcctttgcatagaagtacgaggtttatcagacttcatatagtcgtttacattatttgtaactctctcaaaaccatcagttacagtctttccaatgttctctaccgtaacagcttcaccacgcatgttcaacttctcagctgctgtacgagcttcgggaatcactatccagcaaatgatatagatagggatcaagaacttgaaaccaaaaattgcgcaaaaaacaagaaccaaacggaaccaagtggaatcccaacctaaataaacactaagcccccctatcacgccacccagcattttatcatccggattgcgatacaaacggcgacgggttgaagtataagaagaattattatcactattccaggaaccggaaccataaccttcaccggaggcgcccttcgtatttccggaaccggaagcagcattctcctcagtccctgtttccatctcttcaggtttccccatacgattgattacttcttctacatcagttatagtgatcacctgagagccagcagtcagcttctctaaaaaaagttcagagatgcggagttcgatgtcatttacaatctcgtcagcaccgacttgtcttctaaagtgcagtttcagattgcatagatagttatccaaaaggcgataggcgtcttcatcaatgtggaaaacagttccgcccaaatttactgttaatgtctttttcattgctatttgtttttaaaatttatactgatacgaggtttttaatatcttgaatctaatagttggctatatgattcactgtttcattcaactcacgccaggagatttccaactctccaagaaaaacctcccctttcgaagtgagcttgtaatatttacgtggtggtccttgtgtggactctatccattcgtaacttaatagatcgtcattcttcagacgagtaagcagggggtaaagcgttccttccactacgatcagcttggcttcctttagtttctggatgatatccgaagcgtaggccggttctttgtgaagcagtagcatgatgcaatactctaacatgcccttacgcatttgcgactttacattatttacgtccatctcttattagtttacgattcgacaattttctattttacagcaaagatagcaactgattgaaatagagcctttctttgtatgacacaaatatatgcattatcttagtactatgcaatacaaagtaccttgtattttatttaattaacactattgtctattcacaccatattaataaagcaccaagggagagaataacatataagagaaaaatgtatctttgcgaccaaactgtaaatacaacgaactatgttaactatcagaaaagcaactacagccgattgtgagctgattcataaacttgcatggcagatatttccggaaacctataaggaaatcctttcaccggaacagaatgactacatgatggaatggatgtactccatagagaacatccgcaagcaaatggaagaagaagggcatgtatatttcattggatacaaggacaaggaagtgtgtggttatgtatctgtgcaacaacaaggtgaagatctatttcacctacagaaaatatatgtactcccctcttttcaaggatcacattgcggtagcttcttattccatgaagccgtcaaatatatcaaggaagtacatcctggtccatgcctgatggagttgaatgtgaaccgtaacaataaagcgctgaatttttatgaacgtatgggaatgaagaaattgagggaaggggattttccgataggaaacggatattatatgaatgactttataatggggctggagatcaattagaaattgaaaattaaaaattaaaggctgcgcaaggttctcttttgaactgcgcagcctttaatttttaattttcaacttctaattattccgttactcgttctaaccattttaccatgccaaacataacgcccattgacacaagacaaataacaaagaacacagtccagcactgccagataggaatcttattatacatcataggaccaaggaataagaagagatttcctatcgctgttgcacccagccacaagccttgacacaagccctgaatatgcttgggagctaccttagaaacaaatgaaagaccaagcggcgaaatgaaaagctcagctacagtcaggaagaaataaaccactatcaatacccatggtccggctttcaacccagctttggcagaatccgccattgccttaaattcagtacctgacgggtaaccttgcattgccgaataaatggtaaggaataagaatgcaagtcctgcaatacccataccaatggcaatcttcttaggagtagaaatttgctgaccacgacgggcaagtgtaccaaagaagagcattatgagcggggtaagtactatcacaaagaatggattgacagcttgccaaatttcgggtgcaatactatcggttactacgaagtcgcgggcaaaaagtgaaagcgactgtccgttctgatggaatgagaaccagaagaaaatcacgatacccaatacagcaaacagtgcatacaaacgttgctttatctcctttgccatggctgctttctcggcaggtgtataagtcaccgattcttgtttttccttcttgcccggcgtagggaataccttccgacacgcaatgaaaatgaaaagagaaataagcatagctactaccgaagctatgaatgaatagtggatacctgtattaaatacatcaagatattgggtacagaaaacgctcaaatcagttgttaacgtacctcccactttgacaaccagttcatttaaattagagagattatcggaagccatatctccaccttccttaatatattgatggcacaatgcaggcagatcagcattgtacatcatgctatgaaccttcaaccaccattctctgagcagaggagcaacaaaaggtgcaatcaaaccaccaatattgatgaatacatagaatatctgaaaaccagaatcacgacggctcttagccagcttcaaggcttcaggtccttttttctcagcttctttttcaaggttgtcgtacatctgacctacgatagcctgtaagtttcctttgaaaagtccgttaccgaaagcaatgaaaaataaagagacacaagttaaaggaagcaaccaaccaatattttcagtagtagacagtacaggaatagatagaatgacataacccaatgacatcactatcaatcctgacatgattgttcctttatagttttgcgtcctatcggcaataataccgcctaccaaactcagtacatagataccacaataaaagaccgagtagataatggaactggtttcgtcactcaggccgaatttggagcagaggaacagtaccagtacggcattcatgatgtagtagccgaacctttcgcccatattggagatagcagctgccaacagacctttaggatgattcttgaacatagatataagtttttaaattagtaattagattgattttcgtttattaaatgcaaatatatacattttgctgaaataacctgtaaaaaagtgaaattagtcatgaaaaaggatgcaaacttcagcatgaacctccttaattaaatcatttggatcaagtttaagctgcaggccacgctgacctgcacttatgtagatataaggataattgagacaagattcatgaatgtatgtaggaaaaggtttcttcatgccgataggagtacatcccccacgaatatatcccgtcaaaggaagtaattctttcatcggaataagatcacacttcttattacttgaagccttagcagccagcttcaggtccacttcatgttcgccaggaatgacgcaaacaaaatgaccattcttgtcaccatgcagtacaagggttttgaatacctgctcgatattctcccccaagctatcagccacatgaatagcactcaaatcattttcatccacttcatagggaatcagttcgtatgcaattttggccttgtccaaaagccttgccgcatttgttttattgatcttcataatttatccttttaattcttctttcaggaatttaggagtatatcccttcttacttttcgccacttcttccggtgtgccgcagctgaggagttgccccccacccttaccaccatcaggtcccatatcgatgatataatcagccatcttgataacatccagattgtgctcgatgacaatcactgtgttacctttgtccaccaatttattaagtacattcatcagtacacgaatgtcctcgaagtgaagtccggtagtaggctcatcaaggatataaagggtttttcccgtatctcgcttggaaagttccgtagccaatttcacacgttggctttcaccaccggaaagtgtggtggaagattgccctaactttatatatcccagaccgacttcctgtatcaccttaatcttattcagaatctgcggcacattttcaaagaactccaccgcacggttaatggtcatatccagtacatcagcaatagattttcccttgaagcgcacttccaatgtctcacgattatagcgtttgccatgacagacttcacagggtacatatacatcgggcaggaagttcatttcaattgttttgtaaccatttccttggcatgcttcacaacgtccgccactcacattaaaggagaagcgccccggtttataaccgcgtatcttggcttccggtaatcctacaaacaaattacgaatatcagaaaaaactcccgtataagtggccggattagaacgcggtgtacgtcccaacggagactgatccacatttaccaccttatcgatgttttccaatccctcaatgctatcgtattccaggggatcctgaagcgagcgatagaacttctgcgaaagaataggttgcaatgtttcgttgataagcgtagattttccgctaccggatacaccggtgacgcagatcaacttaccaagaggaaattccacatccacccctttcaggttattcccccgtgcaccacgcagccaaaggctatgcccattaccttcacgacgtttttggggtatttctatctcacgttcaccattaagatattgtgatgtcaacgtatgcgtctccaacatttccttcggagttcctgcaaaaacaacctcaccacccaagcgtccggctttgggtcccatatcaatcacatagtcggcagccatcatcatatccttatcatgctccacaacaatgacggagttaccgatatccctcagctctttcagagaatgaattagccgctgattatcccgctgatgcaagccaatactcggctcatcaagaatataaagtacattcaccaattgcgaaccgatttgagtagccaaacggatacgctgactctcaccaccggaaagggttacagaaccacggtcaagagcaagataatccagtcccacatccaacagaaatttcaaacgggtacggatttctttcaatatttcaacagcaatttgtttctgtttattatccagatactgttcgacattcatcagccagtcgtaaagctcattgatatccatacaagacagttcatagatattcttatcatggatacgaaaatgaagggcttctttattcaatctcgcgcctttacattcagggcatacagtagtcttagcaaactgttccgcccacttttgcgcagtagcggaagcatccttttcctgtaacatctgaatatacttcactactccctcaaacgttacaaagtaatcggaggaagtgccgataagagagcttttaatcttaatacgctcatccgaaccgtagagaatttcatcaatggcttcatccggcaactccttaacaggagtcttcaaggtagcttcatatttttccaataaagcggcaatctgccagaaaatcatgctattcttgtacttacctaatggaatgacagctccttcgtatatagaaagttcccgatccggaatcactttttccacatcaatctgattcacaactcccaatcccttacatttagggcaagcaccttgcggagagttgaatgaaaaattgtggggtgccggctcacggtaagacaagcctgtaacgagacacatcaaccgcttgctataatggcgcacattttcggactgtaaatcaagtatcatcaacaagccgtcaccttgctgcatcgcggtagccacactgtttttcagacggacatcatctttgtccgtcacaatcagcttatcaataaccacttctatatcatgattcttatagcggtccaacttcatgccgggtaatgcctccctgatttcaccgtctacacgaacatagagataccctttcttacgcacctgttcgaacagttctttataatgtcccttacgagtacggactaatggagccagaatataaattttcttgcctttataatcattcaggatcaaatcaagaatttgctcttcagtgtattttaccattctttcacccgaaagataagaataagcaataccagcacgtgcataaagcaaacgcaaataatcataaatttctgttgtagtgccgactgtagaacggggattcttattcgtcgttttttgttcaatagaaattaccggactcaatcccgtaatcttatcgacatcgggacgctccagatttcccaggaaattacgggcatacgcagaaaaggtttcgatataccgacgctgtccttcggcaaaaatcgtgtcgaatgccaacgacgacttgccgcttccgctcagtcccgtaataacggtaagactgttacggggaatttccgcatcgatattttttagattgtgcacgcgcgcaccatatacattgatgtattctgtttcttctgtcatttatcttaatatattaatatcacttttaatcttgtaattaactccatctgctccctccgcttctaccactataaaataaacaccttcaggaacattctttccatgcgcagtaccgtcccatcctgcatcaatattctgtaatccccagcggtaaagttcttgtccccaacgattgaaaacatacgcattgaagcggaccagcgacttgtgctttacacgaaacacatcattcactccgtcgccattaggcgaaaaagcattcggcactttaagttccgattcagtaatgcggatcataaaagtaccggaaatattcgtttcttccgtctcaacatccgttataatcagacgaacataaaacatacctgactcctgaaaactataaatagtttcagcatcaaaacgtgtcagaaagatatcgttgaaagcagcgtcgcgagaaaaattccactcataacgcagatttaccgtttcgtccgattctcctccggaatcttcgtctctccacacgaatcggaattcaagaggagcagcaccagtatatgtatcatctggcgaaatggtaactttctcttcaggaattgctccgttttcagaaagcaagattgccacgggagacatatccaacagttctgtctttcccccgtcagcccacaccggtaaatatccaagcagcaacattgctgcacaaccgatatatgaaaacaatccgcatcgcataatacctgcaaaaataacggtttccaagcgaatatcagcggatacataggatttttcagttttaaaatgcacaatattatttcttaacgcattcctttcgttaattttaggcaaaattcttacctttgcagctactttgggaaattgtaaacgtaaaccaacgatatcgaatgagaacgattaaccggattttctgctccttgctgcttgccagcgcatgcagtctcggtgcaattgcgcaagagaaccagtcatattttctgcataccattgaaaaaggccagagcctttattccatatccagtatgtatggtgtcacacagtcggacatcgtaaagttaaatccaggaagtgatgaaaaaatattcgtaggacgcactctccgtattccacgaacagctgccaatactcagacagagacctttcacaccatagcacaaggtgaaacgctctatcggctaaccgtcaagtacggtgtgtctgccaaagccatttgtgatgccaatcccggactgagtgcggaaaacttccgcatcggacaggtaatacgcataccttctgccagcgaagccgatgtagtcaccactgaaaatgttacagaagttgccatccccactatccaaggccccgtacaatcacgttgtcgggatatgcacaaggtaaaacggaaagaaaccgtatacagcatcagtcgtgaatatggcatctcagaggcagaattaatagctgccaaccctgaattgcaaggtgaagataagattaaaaaaggtactttcttatgtattccttatcctaccgcacaagtagagaaacccgcgcaaccacaggtagcacccagcaacagtgaattattcagcgaaaataaaaaagaaacagaacgcttcagcactatcaaagccgctcttatccttcctttcctggatgtttccaaaagtgaagcggcacgcatggtagagtactacgaaggattcctcatggccgtagacagtttgaaacgcagtggagtttccattgatctatacacttacaactcaggcccggagaatgcgtctctgaaccccattctttccaaaaaagaaatgaaagatatggatattatctttggtccgttacaccagcagcaagtcaaacctttggcagattttgcacagaagaatgatatccgcctggtagtaccgtttacctccaaagacaacaacgtattccgcaatccatccatttatcagattaatactcctcaatcatacctttattctgaagtgtacgatcactttgtacgtcagttcccaaatgctaacgtaatctttatagaagccagcacgggcacaaaagataaagtagaatttatcaaaggtctgaaagacgaactgaaaaaccgttccattcctatgaaatcattgaaagaggatgcaacggtagaatctctgaaaactgtattacgtaccgaccgggaaaatatattcattcccacttcgggaaacaacatgactttgataaagatacttccccaattgactttgttggttcgcgataatccggaaagcaatattcatttgttcggttatccggaatggcaaacttatacaaaagatcacttggaagcattcttcgaactggatacttacttctattcatcattctataccaacaacctgttacctgccgccatcaatttcacgaagagttatcgcagatggtatggtaaggaaatggacgaacgctatcccaaattcggaatgttgggcttcgataccggctatttcttcctgaaaggtctgtcgcgttatggttctgaattagaaaagaacatgcaacgcatggatctggtacctatccagaccggattcaaattccaacgtgtaaacaattggggtggattcatcaacaagaaagtattctttgtacgcttcaccaagaattatgagttggtaaaactggattatgattgataacagaagttttaaatccaaagacaatgaagataaaaaatagtataggggctgctttgttgcttgccgcatgggctttgcccagtcatgcacagattggcgaacaacgccagaactttgcagtaggcttcaacggcggtatcaatatcaatagcgtcagcttctctcctacggtccggcaaaaaagcctgatgggtatcaacggaggcttaacagcacgttatatctccgagaaatacttcagcatgatttgtggtgcacaagtcgaactgaacttttcccaacatggctggagtgaattcgatgaagatcaccccgaactggaatatatacgcaagatgaattatgtagaaataccgcttctggcacatctggcattcggcagagaccgtggagtgcagtttttcgttcatgcaggtccgcaaataggcttttttatcagtgataccaggaagaagaatgacgcatggaacaactatacctctactcctgagcaacacgataagaatgtagaaaacaaattcgattatggtattaccggtggtgccggattggaactacgtaccaaagccggtaatttcctagtagagggcagatactactatgccctgtccgatttttacaaaagcaccaaaaaagactatttctcccgttcagcacacggcactatagtagcgaaaataacctatctgtttgatctcaaaaaataaattccctaatacagaagaataaattactcaatacagaaaaaagaaattccccaatacaagataaaagaaagcgtcccgagacttctgtacgaaatcccgggacgtttctcttttatctgctttctcttattttctcaatctgaaactatccgctgctttcaccattacttcatcacgataaatagcacggaaagacaaataattcaaaacaatagaaattgcggggagacacagtgcccaacctaattgaaaagacattgcctccaaatcatctttcaacataaacataaatacgaaaaatgccgcataatatccaatcaataaaatactgttgaataccgtcatacgaacttgcaacatccggttacgaaacaggaaaatagtacagaatgccacaacagtactcaaaaacaaaattccaaataatccccacgtagattgaaaggcatcacttgccagcgttacacccaatggcttaaaaacaaatgcagtaactccatccgaagctataaattgccctaccggcaaacacatagctgctatcagcaagcctgtcacaattaataaatagacagattgaattcgttgtatcatagttctttttctttgttaaagcaacaaaggtgtgcccaagcaaactttactcgggcacacctttgcagtaatttcatttactgtaatttttctttttctttagccgggttacgatagtagatcttaccttcaaggtactcttgcgttgcgatcaatgtcggcttcggcaatttctcataatagcgtgaaatttcaatctgctcccgattttcgaatacctcttccaggttgtcattataggaagcaaactctgacagtttcttggaaagatcacttttgatttccacactgatctgatttgcacgcttgcctataatagatacggtttcgtacacgttaccggtatctgcacacaactccatcatgtcacgggtaaccgtgctgctgggagcattagttttcttgtaatccataaatatctaaattaatattatcctaactctgtttatcttcattcaatatcttctctgaatctttaaagattctatcggcttccttcatatatttactttcaggaaactcgtttttgaaagcgtaatattcatccaccgtttcacgataacgctctgccctcttatcttccacactatatatggccatttcatatttggcacgcaaaataagaatagacaggtcttcgcgaaggtttgtataaggatagtccttcaaagcgttttgcgcagtaattacacaagactgataattgtttcctaggtaattacccaagttatagtacaatttggctgaaagatattctttcatcaccaatttatcctgcaacttaaatatcatatcctgagcttcttccttctttgaactttgcgggaagtactccataaacatttgtaattgctgaatagcggcataagtaccagactggtcaagacggggttcaggggtatccagatacaatgcttttcctgcatggaaacgtgccagttcggtaaacgtaccgcgaggatatacattaaaatattgaacgaatgtttgggcggctgtctgatagtctttctgattataatagctcatacccagcatatagagggattcctctgccttgtccgtacccttaaggatagcaattaactcattaagcaatgttgcagcacgattatactgtccttttgcgaagtagttctttgccgcctcatacttatactcatagtcggtgctctttaacagcttattgtattctccacacgaggagagcaacactgccgcaagcaaagttattaagatattcttcttcattcttagcttttcaaataatgtgcaaagataaaggttcgcaccgaataaaccaatgatacgaaccttaatttttcaaaaaccaggaaatgaccgacaaacgccaatcaattcacgacgaaccgggataatgaacagtctgaaaaaacagtcattataatttatacaaatcgctcgccgcaagcaaatctactttcttttcagtcagtacacgaatacagttttccatatcgttgggacgaataatgacattcgccgtttcaccattggcaaatgaatacatatattcaatgaaaacaccctcatcagacaagaaacgcaggacttttgacagagagcccggaatattaggacaattaatgcccaccacatccgtcacattcacagcaaaatgattatcttttaaagctttatatgccttatccggttcagacacaatgccacgaagaataccaaaatcagcattctcggcaatacagagagcggaaagattgacaccttctttcgcaagcacttcagtcacttctgtcagacgaccggacttattctcaaggaaaatagaaagttgttttgctaccataataaatgaattacaaattactaattatgaattacaaatcgcgaattaccaattacgaattacaaaatcgctgtaattagtaatcggtaattcgtaattattaaagtttccgattatcaatcacacgtttagctttacccacactacgttcgatgctgcgaggttctaccaaacgaacatccacacccagtcccaggacactttgaagacgaccggccaattttttctttaatgccagcattttattgatttcatcagagtagtattccggacgcacttcaacctgtaattccatggtatcggtattattcttacgatccacgatcaaaagataatgcggttcaaattcctccatttcaaggatgacagactctatctgagtcggaaatacattgacaccacggataatgagcatatcgtcactacggccaagaatacgatccatacgaaccagcgtacgtccacaagtacatttgtcataatgcaaggcagtaagatccttggtacggtaacgcaacagaggcataccttctttggtcagatgggtgaatacaagttcgcctgtctcaccgggagcagccggttccaaggtattcggattgataatttcagggaagtaatggtcttcgttaaggtgagtaccatgctgacattcacactcataacctacaccgggaccagcaatctcactcaatccatagatgtcataggctttaatgcccagtttttcttcaatctcattacgcatattctctgtccagggttctgcaccgaaagcccctattttcagtttgaattcttcgcggggcaaaccggaatctttaatggcatcagccagatagagagcataagaaggtgtacaacaaagtaccgtagaaccaaaatcatgcattaaagtaatttgcttttccgtgtttccgcttgacatcggaattacggaagcacctatattttcagcgcctgcatgagcacccagcccgcctgtaaacaacccatacccgtaggctacatgaaaaaagtcggaactatccgcaccataagccgtaaaagcacgcgaaagacattctgcccaagacgaaaggtccttgcgggtgtatcctactacggtgggcttacctgtagtaccagacgaggcatgaatacgtacgatctggctcataggcacggcacaaagtccgaaaggataattatcgcgcaagtcatatttggtagtaaaaggaagttttacgatatcatctatactattaatatcgtccggggtgatccccagttcctgcattttcttacggtagaaaggagtgttgtgataaacatgctccacgatctttttgaggcgaatgctttggattttacggaggctttcacgatccatacattcgatgctttcattccaaatcatgtctttgttgtattacattgatggttattattaattcttatttcctgcaaaggaataaaaaaattttgtttatctcaagtattttcccgaatattgccgaccataaggagagaaaatgaataaatttgaattaacatccgcctataagcccaccggtgatcagccggaagctattgcagagctcactgagggcgtacttcagggagttccggcacaaactttacttggtgtcaccggttcgggaaagacgttcaccatagctaatgttattgctaacatcaataaaccaacgttaatattaagccataataaaacgttggccgcacaactttacagtgaatttaagtctttcttccccaataatgccgtagaatactacgtttcttattatgattattatcagccggaagcttatcttccgtcttctgatacatatatagaaaaggaccttgccatcaatgatgaaatagacaaactgcgtcttgccgctacttcttccctactctcgggccggaaagacgtagtggtcgtgtcttctgtatcctgcatctatggtatgggaaatccgtccgacttctataataatgtgatagaagtacagcaaggaaaagcattcagccggaacgtttttctacgtcgtttggtggacagtctttatgtacgcaatgacattgacctgaatcgtggtaacttccgtgtgaaaggagatacggtagacatttatctggcgtatgccgataatctgctgcgtatcattttctggggagatgacgtagacagcatcgaagaagtcgatccgattagcggtgttaccatcgcccgctttgatgcatataagatatatcccgctaatctgttcatgaccactaaggaagccactctgcgagctattcacgagattgaagacgacttgcacaagcaagtgcaatggtttgaaaatgagggacgtccctttgaagcgaaacgccttcaggagcgggttacctatgatatggaaatgatacgcgaattagggcactgttcaggcatagaaaactattcgcgctatttcgatgggcgtaaggccggcagtcgtccttactgtttattggatttcttcccggaagattttctgattgtcattgatgaaagccatgtaagtgtaccgcagattcgagccatgtatgggggtgaccgcgcacgtaaaataaaccttgtggaatatggtttccgtcttccggctgccatggacaatcgtccgttgaagttcgaagaatttgcggaaatggcaaaacaagtgatttatgtgagtgcaacacctgccgactatgagcttatccagtcggaaggtatagttgtggaacaagtgattcgtcctaccggattgttagatcctataatcgaagtacgtcccagccataaccagatagatgatctcatggaggaaattcagatacggatcgagaagaacgaacgcacgctggtaacaacgcttaccaagagaatggcggaagagttaacagaattcttactgaataacgatgtgaagtgtaactacatccacagtgatgtagataccttggagcgcgtaaagattatgagtgatttgcgtgaaggcatctatgacgtccttattggtgtcaacctgctgcgtgaagggctggatttaccggaagtgtcacttgtagccattcttgatgcagataaggaaggtttcctacgttctcaccgctcgctgactcagactgccggacgtgccgcccgaaatgtaaacggaatggtcatcatgtatgccgaccgtatcaccgatagtatgcgactgacaattgatgaaacgaaccgtcgccgcgaaaagcagctgaaatataatgaagaacatggcattacgcctcaacaaatcaagaaagggaagaatctgaatgtatttgcatcaaatgctccaacagaagatagttatatcgaaaaaggagcgacgatcactccccgcccctacatcgaacaagaaagctctgctcatattgccgccgatccgattgtacaatacatgtctcgcccgcaattggaaaagagcatcgaacgtaccagaaagcttatgcaggaagctgccaagaaacttgacttcattgaagcggcacaatatcgtgacgaattactgaaaatggaagatatgctgaaagaaaaagtctaataccacttttcttaaaatagtccccgccttttcttaaaataaatagagaaagcggggattttcactaataagtgttattaaacatactttttttcttggataatttgcagttatcctgaaagtacgtatctttgcactgtgtttttcatagtattagatttaaggttaacaaaggttggagtacagcggtactcctttttttatgcccatacatcagtaaaagaagagaaaacggcattaaattagtggagtatttgccacatttagtgcattatttgtttcccctgttgctcccaacaaaacatatatttatttttgcaggcattcatatgaaactctaaaaataccatgaaaaagataatactactacttgctacaactcttatcagtacagcacacatccatgcccagaaactaacagtacataccatcggagattccacaatggccgactatgtagaaaataccacccgtacacgcggatggggagaaatgctgcaggaattctttacttcggatgtacggatcatcaattatgcccgtggaggaagaagctcacgttcattcacagaagaaggactgtgggataaagtaaaaagtaatctgaatccaggagattacgtattcatccagtttgcacataatgacgaaaaagaacagggaaaagatggagcagacggacgggggacggctccatggactacttacaagacttttcttgaacagtatgtagacgaaactgaagcactgggtgctaatccggttttcatcactccaatcgtgagacgttatttcaccaaagcgggaacgatcagtcctaaaggctgtcatgacattggcattgcccctgatgactcaaccttaaactatgtacgagttatgaaacacgtggcgcgtgagaaacaagtccccttggtagacatgaccacactgaccaagaattttacagagcaactgggagaagaaactaccataaaatgcatatacgtaccaacagacggcacgcatacacaggctacaggtgctacatgttatgccgcactcgtcgctcaggaattgaaacaacaaggcatactttccgattatatccagaaagatgcaccacttattctaaatcccacctcacttgattttcaaactatctatataggagataaagcaactttgtgttttgatctcaccgggttaaaactaactccctccagtggtattttacgtttggaagctccacaaggcatgacactttccgatgctccccaatcttcacctaaaaccgttatcgaactaccctattcaaatggcagattatggaatcaatgtttttatcttcatttctctcctaaacatgcggaaaaagtttctactgttatacctattatatatggaaacaataagcggtttcttccagtgacggctatcagcaaaaagatcagtcaccaaagtcctgtaatccgggaatgtcccgacattgccgtaaagagcctgatacaaacagaaaaaggtatcacgatagaaaccggtaaatggcctgccgatattgatgaggacggcaaacgttatgcagaagtcatcatacaaagcaatgaaaagtcacttataatccgccggatttctttcactctggaaggggaaatttcttatcgcctcgcctatgcacacggaaaagacttttatccacgtaccgatctggcagaacagccacatgccccaaaagctcccggtaaacagatattccctgtcaatgtaacgttaaagcctcatgaacgcctccatatccgacttttcccatggagcacacggcaaagtaaagaattatattttagaataaaagattgccggtttgagggaatggaaatagaataaggtttcgttggataagatcaaatactcaaagtacctgataggaagatttcggccagttctgcctgatgtaatcaactttactatcttccgtcaccagataatcaatgtctcctaaagaagcaacgctataagcttcagccgtattcaacttatggctgtctgccagtataatccttttttgcgcacgttccatcatgaggcgtttcatcatagcctcttccctatccggtccggtaagtccttgatggggatgtacattactgatacccagcaccaaccaatccggccgtatagtctgtaatgcctggaaaacagaaactccgactgtcacttgagaagaaggaaatacttttccgccaaggaaaatcaattccagattaggatgatgcatcaagacatttacaataggaaaactattggtataaatgcttaattccgcatctacaggaatctgtcgggctacttccagattggatgtaccaccatccatcaacacaatatctccgggactgaacaatggaatcaccttggttgccatctgctgctttcctgctatccccgtattcagcctatcggtaaattctaccggaatacctgatcgggcaatggcacctccatgtactttagtcaataaaccaagctcatccaattctgccaaatctcgccgtaaagtatcatctgacactcccagttctgaacttaatgcggtgatgtaaatccgataattctgattaatacggtttaaaatgtactgatgtctttcttctttaagcatatctccatgtgtttaaacattgcatattaccgcaaatatacttatatttaagcatgaaagcaataaatactgagcgattatttgaaatcatgcggagttttgcaatttataaaatagataatatataaaaaccgcaagtacaagaaaaccccgcatagtagtaaaataagtaatagctcgctttttataagaaaaacgaatgtttaattattaataaaacttaaaagtatgagacaacagatcttggtagacatggatggagtattggcagatgtatatgcccagttgatcattttcgaatacagggattcagggatcaaactgaacattgaaaacatgtatggaaaaaccgaactggaagcttttccttctttcgagaaacatgtgagaagtaaaggcttcttcagaacagctcctcttattcccggaagcatagagggattgaaatatctgaatgagaaatacaacgtgttgattgtatcttcggccaccgagttcccacaaagtctgaatgaaaaggaagaatggctgagcgagcattttccattcatcacgtgggaacaaatgatattttgcggccgtaaggatagcatcagaggaaacatcatgatcgatgatcatcccaagaatctttctacattcgatggagaacggtatttatttgcacaaccacataatatgtgtgtgccggaccgtaactatcacagagtatcgggctggcaagatattatcaggctgttataggcagactatcagtatatgataaaacactatcaattcatcttatcggaattgcctatctttgccgcacttatcaatattcagaaatctaaaaagaagaaaaacatgagcatcagaaaacgaatgaatgtgttgtttggaacgttactgctgaccggcagtctgttttcacaaaatgtatgcgtatctacccctgaaacctccctggtactctcggcacctgtcggtggtgagctgaaacatgtatactatggagataaactctcggaggtagatttgcagaatataaatcttacagggactccggacatgcccgcttatcctgtgtatggactcaactgtcccggagaatccgctttagccgtaaaacatgccgacggcaacatgactttgcagatggaaatcgtacaggtaaaaacgagcaaagaagaaaatgcggaaatcactgccatcgaactgaaagacaaggtatatcctttctatgtaaacgtgtattataaagcctatcaagatgcagatgtcatcgagatatggacagaaatccgacatcaggaaaagaaaccggttatactcaatcagtttgcctctgctttcttacctattcgccggggcaatgtctggctatctcatctttacggatcatgggcgaacgaagggcgtttgtgtcaagaggcattggaacccggcatgaaggtaataaagaataaggacggggtacgaaactcgcacacctcacatgccgaagtcatgttctcactggatggaaagccacaggaaaatgcgggttgtgtcattggcgccgccctctgttacagtggtaactacaaactgcgcattgatacgcacgacgatgaatatcaccggttctttgccggaatcaatgaggaaaattcagcttactcattaaagaaagatgagattttccgtactcccgaacttgctttaacttacagtaatgagggattaagcggaagtagccggaacttccatcgctgggcacgcctgcacaagcttgctcatggcactgttccccgcaagattttactgaatagctgggaaggtgtctacttcgacgttaaccaggcgggtatggatcagatgatgagtgatatcgcttccatgggtggtgaactgttcgtgatggatgatggttggtttggcgacaaatatccgcgtaaaaatgacagttcttctcttggagattgggtagtggataagaacaagttacccaatggcattgaaggtctgctgaaagatgcacaaaagaacggtgtcaagttcggcatctggatagagccggaaatggccaatacaaccagtgaattttatgagaaacatccggactgggtgattaaggctcccgaacgtgacgtggtgcagggacgtggtggtacacaagtagtgctggatcttgccaatccgcaggtacaggaatttatcttcaagattgtagatgatcttatgagtaactacccggaaatcgactacatcaaatgggatgccaatatgtccatcttaaatcatggttccaattatctgacgaaagacaatcaaagccacatgtatattgaattccaccgtggctttgagaaaatatgccagcaaatacgcgctaaatatccggacctcaccatacaggcttgcgccagcggcggcggtcgtgtcaactatggcatcctgccctacttcgatgagttttgggtaagtgataatacggatgctctgcaacgtatctatatgcaatggggaacttcatatttcttccctgccattgccatggcatcgcatatcagtgccgctcccaaccaccagactttccgcaccattcctttaaaatatcgcattgacgtagcgatgagtggtcgcctgggtatggaaatacaaccaaagaatatgacagaagaagagaagacactttgcaagaatgccatcgctgaatataaaacgatccgtccggtagtgcaactaggtgatatctatcgtttaatgtctccgtatgataaattgggagtagcttctatgatgtatgtaacgcccgaaaaagataagtcggtgttctattggtggaagacagaacactttgtcaaccagcatctgccacgagtgaaaatggcaggactctctcccgataaactttacaaagtgcatgaactgaaccggatagataatgatccgctgagttttgagggaaagacatttagtggtgcttatctgatggcgaatgggttggagataccttataatcataaggtagattaccataagcagaatgattattcaagcagggtgctttggctggaagaggtgaaatagcaaaaagtgattagggtttagcgaatagtgccattcggtatattattttttagacgcggatgacgcagataacgcggatttaaaaggctgcgctataagaagtataaaaaaatccgcgtcatccgtgtcatccgcgcctaaaagattatttattatttaactcataactttatagaaacaaattaattcccccaccaatcccaataatttcacatttttgcgtatgtttgtacaaaagttcaatccagcaaatctacatggaattattagtatataaagcctcagccggctcaggaaagacattcacccttgctgtagagtatatcaagcacctgatactgaatccaagggcctatcggcaaatactggccgtaacttttaccaataaagctacggcagaaatgaaagaacgtattctgcaacaactttacggtatctggttaagtgatccggcatcagagccctacctgaaccgtatccgggaagatttacgacagaaaaacttatctgactctgacatccgttgggcagcaggaacagcattgcaatacatgctgcatgattacagccgttttcgtgtagaaaccatcgactccttcttccaatccgtaatgcgcaatctggcacgggaactggaactgagtccgaacctgaatatagaactgaacaatgccgacgtattgagcgatgccgtggacagcctcattgaaaaactgacaccttcctcacctgttctggcttggttgctggattatatcaacgaacgcattgccgatgacaaacgttggaatgtatccgatgagatcaagcgattcggctggaacatcttcgacgaaggttacatagaacgcggtgaaggactccggcaacaactgaaagaaccggatataatcaaactgtaccgtaatgtgttgcgggaaatggagaccgaggctctggaacaaatgaaaagcttctacgaccagttcatcggagaattggaatcacatgcactcaccgccgaagacctgaaaggcggaacgcgaggcataggcagttatttccgtaaattgcgtgacggacggctatcagacaaagatgtgctgaacgccactctgaagaatagcttggatgacgcaaagaattgggccaccaagacttcgccccgaaagaacgatatcatccatctggcagaaacaagtctgctccctttattgcaggatgcagaaacattcagaccccgcaacaacaagaccgtaaacagttgccggttatcactgcaacacctgaacaaattgcaattgcttgcccacattgacgaagaagtacgggagctgaaccgcgaacacaaccgtttcctgttgtcagacaccaatgccttgctccataacctggtacgagatggagactcttcattcgtattcgagaaaatcggtgccaatatccggaacgtaatgatcgatgaattccaggacaccagccgtatgcaatgggataacttcaaaatcttattgcttgaaggtctttcacaaggagccgacagcttgattgtaggtgacgtgaaacaatccatttaccgttggcgaaatggagactggggaatattgaatgcgctgggtaccaaagaaacgcctattccctaccctgtacgtgtagaaactttaaaaacaaaccgtcgaagcgaaacaaatatcatccgttttaacaacagtttgttcacggccgcagtggagtacctgaatatgctccatctgaaagaattacaggaagattgccgcccgttacagcaagcttatgccgacgtggcacaggaatctccacgaaccgaagccaaaggatacatcaaggctactttcctggaaccggacgaagaacacgattatacggaactgaccatcatctctttaggcgaagaagtacagagactactggctgccggtgtaaaactaaacgatatcaccatcctcgttcgcaagaataaaaacattcctcccattgccgattatttcgacaaaacaatgcatctgcctattgtttcagacgaagctttccgactgaatgcttcacaagcattgtgcatgttgatggatgctttacgttacctttccaatcctgatgataaagtagcaagagcctcattaattataaattacaaattacaaattacaaacgaaaacaaagaagggcgaatggagaaggaaggagcaaatgcgcctgaaacgaagtgggatgatatactaacttcccgaccggaggatgtattgcccgaggcatttgtcaaccgcatagagcctcttcgtctaatgccgctatacgaattactggaagaactgttcagtctgtttgagatgaaccggatcaaagaacaggatgcgtatctcttttcttttttcgatgccgtaacggaatacctgcaaaacaattcatcggatctggatgtatttatccgctattgggacgaaaccttatgcaacaaaacaatccccagcggagaaatggatggtattcgtatcctctccattcacaagtcaaaaggattggaattccataccgtcttaatccccttctgcgactggaagttggagaatgagaccaataatcaattaatatggtgttcaccttccgaatcacctttcagcgcgctcgacattgttccggtcaattattcctctaccatggcagaatcagtatacaggcaagagtatcttaacgagcgtctgcaactttgggtggataacctgaatctgctctatgtagcatttacccgtgccggaaagaatctcatcctttggagtaaaaaaggccagaaaggaacaatgtccgaactgcttgccaatgcactgccacacgtagccgcccaagaaggtaatgaaaactgggacgaggaagaaccttacgaaagcggaatactctgcccatcggaagatagcaagccgacgacgaccgcccaaacctcagtcaaccgccttgctcaaaagcctgacaagctcccggtacacatggagagcatgaggcatgaaatcgaattccggcaatcaaaccgttcagccgatttcattcagggagttgacgaagatgaatcagacaatcgcttcataaaccggggacgcttactgcatactcttttttcagccattgaaacagaaaatgacatcgacaatgccatcgaccaacttatattcgaaggcatcatcggcaaaccggaaacagaagatgaaatccgggaactgacccggcatgccttttccatcccccaagtgcaggattggtattcgggagactggcaattgttcaacgagtgcgacatcatctggcaagaaaaaggggaactccgaacccgccgaccggaccgcgtcatgatgcgcgacaacgaaattgttgtcgtggacttcaaattcggaaaacagaataaaaaatataataagcaagtgcagggatatatgcaactgctcacacgcatgggatacccgaaagaaaacataaaaggatacctgtggtacgtagaagaagatttaatagaaaaagtataaagaatcatggtacgaggaaagcaaacttgcaaaatcttaaaagacatccgccggcaaattgccgaagcaaatgatatcgaatatatcacttccgaatgtcaatacaaaggggattgtacgggtacatgtcccaaatgcgaggcagaagtgcagtatctggagcaacaactggcacgtaaacacatggcaggaaaagcgattaccatacttggagtatccgcaggattggcaacaatgatgccacaacctgcctgtgcggagccgatccattccgaagctccgcatggttactatatagtaactccggaaatacaggagaaaccggtaataagagtcctcccgccggactctctcgtacaggaggttattccgcaagatactaccatatatggcacaaatcagtacgatgcaccggatacaatgcccgaatttcccgggggcatgatcgaactgatgaaattcataagcaaaaaattagatctgaaactccccgtttatcaaggtaacggaacccaaggacgaaccacagtcagatttgtcatcgaaaaggatgggagtatcacaaatgccagaatcctcagaggcgttgatccgtatttagataaagaggctctgcgcgtagtcagagaattccctaaatggaaacccggtacggtagcgggacaacctgtacgtgtggaatatactgttccggtcatgtttcgattgcagtagatataaggcaattataaatcagaataatcatggtacgaggaaagcaaacatgcaagatattaaaagacattcgccggcaaattgccgaagcaaatgatatcgaatatatcacttccgaatgtcaatacaaaggagattgtacaggcacatgtcccaaatgtgaatcagaagtacgatatctggaacatcaactggaacgacgacgcatggcgggaaaagcgatcaccctattaggattgtccgcagggattatcacaatgaatgcctgcgccaactcaccaggccagtcagcaaagaacacctcagagatcaaacttgagtgtcagagcgtgccgacggataaggactcactctttttaatcaaaggtacagttacagacagtctgactcaaaaaccaattgtcggggccaatgtctctgaaagagaaactacaaatggtactctaacagatgcgaatggtgagtttacactaaaagtttccggtaaatatccgctaatcatccaatacgttggaatggaaacacaggaaattgaaataaataagaagggagcaacttacattcaggttgcactgcgtgaaagcaatatgacaatgggagaatcaacaataatatccggagaaatactggaaggagatgttgattacgaaacaatagaaacaacactaccggaatttcccggaggcacacaagctttattcaatttcatatgtgagaatctgcaatatcccaataacgatacatgcgtgacagggcgcgttgtagcacaattcactgtcaaagaagacggcagcatcgcaaatgcccgagtaatccgtggcatccatcctgattttgacaaggaggctctgcgggtgattaatatgatgcccaaatggaaacctggtaccaaacaaggggaagtggttgacacagagtacaccgtacccataatgttcagtgcagaatagttatcaaaaacaaaagattaagatgcaaacttttcttcaattagttgcccaagacttacaccaaaagataggaaacgatctttcacgggtcgccattgtttttccgaacaaacgtgccagccttttcttcaacgagcatttggcggcacaaagtgaccgccctttatggtctcccgcttacgtcagcatcagtgaactgttccgacagctttctccatggaagctgggtgaccccatccgcttagtttgtgagctctataaagtatttcgtgaagaaacacatagtgaagaaacacttgatgatttctatttctggggagaacttcttatcagcgatttcgatgatgtcgataaaaatcttgttgatgccgaccgtctattctctaatctgcaagacctgaaaaatatcatggatgattacgacttccttgactccgaacaggaagaagccatccgtcagttctttcaaaacttctccatcgagcgacgcacgcaactgaaagagaagtttatctccttgtgggataaattaggcgatatttatcacggctaccgcaacaatctcgcagaacttggcattgcttatgagggtatgatgtatcgctacgtcatggaagaactgcaaccggaaaagctgaaatatgaccggtatgttttcgttggtttcaatgtattgaataaagtggaaacccgtttttttgagcgtctgcgtgatgccggcagagcattgttctattgggattatgacttgttttacacccgtctgcctcgtgaaaagactccgccttacacacatgaagccggcgaattcattctccgcaacctgaaaatcttccccaacgaactacccgaaaccgcattcgatgtattaagacatcctaaaaatgtacgtttcatctccgctcctaccgaaaatgcacaggcacgctatttgccggaatgggtacgttccgttatgaaaaacgatccatcaggtacaccaacccaggaaaaagagaatgctgtggtactttgtaatgaatctcttttattacccgtactccactccataccatcagaagtaaagaatgtcaatatcacgatgggatttccgctggcacagacccctgtatacagtttcatcagcgcactcatggaactgcaaaccaatggctatcgcagagatacaggacgttattcatacgaagccgtccaggctgtattgaaacatccctatacacgccaattgtccccctccgcagaaaaactggagaaacagctgacgaaagacaatcgcttctaccctctgccttccgaattaaagcaagatgagtttctggaacaggtattcactccgcagaccggcatttcagccctctgccaatatctgacggatacacttcgcgaagtctccatcctctaccggcaagaacaggaaacagatgatattttcaatcagctttaccgggagtccttattcaagagctataccctcatcaaccgtctgctcagtcttattgacagtggcgaactaaatctgcaaactgacactttgaagcgtcttctttgccgcttgcttgcaacctcaaatattccgttccacggtgaaccagccatcggtatgcaagtaatgggagtgctggaaacacgtaaccttgatttccgaaaccttatcatgctctccctcaacgaaggtcagctgcccaaagccggtggagaatcatccttcatcccttacaatctgcggaaagctttcggcatgaccactatcgaacataagaatgcggtctatgcatactacttttaccgactgatacaacgcgctgaaaatatcactttattatataatacatcttctgatggactgaaccgtggagaaatgtcccgtttcatgctgcaatttcttgttgaatcgccgcacgatatttcacgcgaatacctggaagccggacaatctcctcaaagtggcagagaaatccgtatagagaaaacaccggaaatcattgcgagaatgtatgagaaatacaatctcgtccgccatcccaaagcactgttctctccttctgcactcaatgcttatctggattgccgtttgaaattctactatcgttatgtggccggattaaaagctcccgatgaagtgagtgctgaaatagactccgcactgttcggtactattttccaccgttcagccgaattggcatataaggatctgactgcaaatggaaaagaaatacgaaaagaagacctggagcaactgttacgcaatgacgtgaagctacagaattatgtagatacagctttcaaagaagagttcttccacgttctccccacagaaaggcctgaatataatggtacgcaacttatcaatgccaaagtgattgcatcctatctccgccaattgttgcgcaacgacctgcaatatgctcctttcgccatggaaggtatggaagaacctgtaaatgagatcatggaaatagaaactccgcaaggaaaactggcactgaatatcggtggtaccatcgaccgtatggacagtaagggcgatactttgcgtattgtagactataaaaccggtggcagccccaaaactcccgaaaatatagagcaactgttcactcctgccgacggacgtccaaactatattttccagactttcctgtacgcttccatcatgtgccgcaaacaatcgttgaaggttgccccttccttgctctacattcaccgtgcagcatcagaaacttattctcctgtaattgaaatgggggaagcccgccaacccaaaataccggtcaacaatttcgctttttatgaagatgagtttcgcgaacgcctgcaaaacctattacaagaaatatacaatccggaagaacccttcacacaaactgaagataaaaggaaatgtgagttctgtgatttcagagacctgtgcaggcgctaataaaaaaacagaccgtccgttcacctggaacagacggtctgttttgtttttctttattgtacatttattttttcaacggaactgaaaaactgaatatagaaccttcgcccttcttcgaagtaaaccacaacttaccaccattcttcaccacaaagtcctggcacaacaacaatcccaagccggaaccttcttcgttgttagtaccgaatgtactgaagtgagtatctgtatgcagcaatttcttttgtccttcttcatcaataccgcaaccgtggtcttgcacgctgactactgccatgccatccttcgcttccagcttcaccagcacctcagagttttcgttactgaacttaatagcattgcttatcagattgcgtactacggtcttcagcatatcgatgtcggcagatacagctaacttctccggtttctcttcacggattgtaatcttcttcataccggctaccatattgaaaatgtcgatcactccatccacaacctccactacatcaatgtcctgatatactacattcaacttaccaatctggctcttggtccacttcagcaagttatccagcaaagagaacacatcttctgtcgtctggtttgccattgtcagcagttcatacatctcatcaccgattttctcggacggcagattcaatatcaacatattcagcaccatcttgatggagcccataggagaacgtaaatcatgagcaatcaccgaataaagtttgtcacgtccggcaatggtacgttgcagctcttcggttttattcaaaataatacgtttggcagctaccaacgaaatctggtgggttacacggataatcagctcttccttgttaaaaggtttggagataaagtcatttgctcccacctggaaaccttttacaatatccgtcgtgctgttcagtgcagtcaggaagatgataggaatatctgcggttttgggatttgctttcaaatgttgtgccacctcaaaaccactcatatccggcatcatcacgtccagcaacaccaaatccgggttttccttatctacctgctctaatgcttgccgaccgttacttgccgtagcgattgcaaatttttcatttgtcaagagtaccttcaacaataatacgttggacatcacatcgtcgacgatgagaattttgtactcagaaggattaatttccatattcatcttatacaatattgttttcccgtttatctatataatctatttacgatattccttaaaatattccacaatccgcttcaaaccgtcttccagttcaatggcaggcttccagttcagcttctcttttgccagcgtgatatccggctgacgttgtttaggatcatcatgcggaagtggtttgaacaccaacttcgacttcgatcctgtcaactgaatcactttttccgctaactcgaggatggaaaattcattcggatttccaaggttcaccggaccaataaattcatcctccgtgttcatcattctcaccattccctctatgaggtcatcgatatattgaaagcttcgcgtctgatctcctgctccatagatagttatatcatgatcctgcaatgcctgaaccacaaaattggaaaccactcttccatcattcggcagcattcgtggaccatacgtgttaaagatacgaataattttaatacgaatgttgttttgccggtgataatccataaacaaagtttcagaacaacgcttcccttcatcataacaagaacggatgcctattggatttacgtttccccaataactttctacttgagggtgcactaccggatcaccatatatttcactggtagaagcttgtagaatcttggcattcgtcttctttgccaatcccagcatattaatggctcccaatacagaagtctttatcgttttgatcgcatcatattggtaatgtatcggtgatgccggacaagctaaattgtatatttcatcaagagtttcggtatgatagggaaattccacatcgtgatgcacaaactcaaaaagaggattgcttttcagatgctcgatatttgcttccgcgccggtaaatagattgtcaagacatatcacatgatgtccttcatttatcaaccgtgtgcataagtgcgaccctataaaaccagcaccaccgctaaccaatatatttttcatgtaagttttttataatgtccgaagacttatgaaaccagtttgtttgtttatgatggcaaaagtaggagatttggttaacttatgcaagtttgtaacaagatatttcacttgttaatgataacaaaagaacataatagaaacaaaaataccccaaacgggcattttattcttcgggaaccggcgtttcaaccggatttggaatactaaaacttttgtccgagaacaaatccgccaagccggaaatctgcttcaaacgaagaagttcatcgcgatccatgcctatatttttcataatccattggtcggacatacccgctttatccagttcggccacgatgtggcacatcagttcgatattgtgcgaacctcgtgcacggttatgccggatggtagatgccattcgattggataattctttatcaatcaccactacaggcaacaaaccgttttcccgctgataaattcgcttggagcttctcaacacactataacgatgatacccgtctaccagtatataacggtcggtttcgttatcatagtaacatacgcaaggcatcgtaaaaccatcctcccaaatagaaagttccagtaatttcatctcaggtggtgccactatgttgggattataatcattcgccactattttctccaccggcacagcttttacggcatataccggactttgatctacactcataacatcatatttttgaattgttccattattttatctcgtttgtatgcttcctccttatttaaggcaaaacccatatatttgcaggcatgatcattcttcagaatacatacacacattctcttatacgtggggatttcacgaaactcagaaatgtctatgtcatccaaatagtccattttaacaggcttcttatgcgtcttataattggtcgtattcaccacttccaatgacacgccggcttttcttagtttctcaatggtctcctcagcaagacacccgcctttcgtacgccagaattcaatgctgacagtcagtttcttcaaataattgcgccgggtagtttcgggtaaggtagagagcagaaattgcatgaattctttccaggtataccccttcggcagacggacggtttgccagcccatagcatgggttccgccataaatcccggtaaagttcaccccattaacacggcctaccatcttgccccatgtacttggatcaatcactttataaaggcgaagactttcctgagcttcacaaaggaaggggcttgctacgcgctggcgctcaatgtttacacctgctttataatataaatcatataaatgattatagtcccagccaaaccttccattggctacccagatatctgtcgttttccagtcgaaaacaggataagcattgaagatatcatttccgattttagaagtccatcggtaattatgatacatctgatatttccgggcaaggtgaatactgcgccagcgattgaaactttcctgcgtacgaatacctatgagaaagcaggatcgaaccgcatctttccttgcatgcaaccatttggcaaaatgcatctgaaattcataatcccacattgcatccgtataaaaagggaagtcctctacggtcatgctgccttccggtatgttccgtacccatatatcacgcatctccggatcccaaggacgccaataattctgatacatagacgtacaggtggttactttaaaaggtacgcacacgcgatatacctccagaatatccttattagcttccagaatacggtccacgtaatcgatagtcatgctatactgaatttcataatccatgtggtaaacagaaagtttacgcttcagattattgcgacggatgtaatcaatgcataaattcaataacacgccactatctttccctcccgaaaaggatacacagatattatcaaattctttaaatataatgtgtaaccgttcttgtgctaattcatatacattcttctgaacctcccccattctatttctccttattcatttttacatagcgtttccattctttctccacagaaaagcctaattcctggaatattttttgatgctcaataaatgtaactgagctcaactgcttatcttcatctgtgctgtctataactttctccaaaagagcttttaatacttctgcattattctcctttatataatagttattaataattgcttccgatttcttatgttccagcggtataaagccaactatttcttttccttccaccgcaataaaccatataaagttttctgaagtgcgaaaagggtaattatagttctgtttcaatactacaggattcataaccaatggagcgaccagttgatacaaccgtttctccgtgccttttaattcaactatttgtgtcattatcgatttgttatttattatggtttgagtttacattcccatataaaatagtgcagacaaaattaaataaaaaaagaatagagacaataaagaatggagaaaattaataaaattatatttattaaatatataaatcttaaactacagtatatttctataaaattacttattgagttagccggtaaggtcgttgtcacaacctaacgcattgcccggcgataccgtggttcacatttgtgccgcttcgctccgtatcaattatatgaaaatagaaaatttcattttcaaccgattaccgaaaagagtaaatagaagtaatgtattttcataacattagcatggaaatattcagctctgtttttgatataaaaccatttattgacaaatcctgaatggaaggattaaggcaagcattatttactgatattcaagatattaagcaagagaaaaaacatcatattggtgtcattttggtgtcagtgtcacctatacacgcatttggaagcaaaaaacagaaaaaggaagtatcgatatgtttatatttaagataaaaagagaacaagctcaatttacggcaaaaaattccgcacagacggtacatgtatacatatttcacaatctaagtatctactcttgcagtgcagaagaaagagaattgaagaacatgctaaaagacataaaaaagtataaacacaaaatacaaattaaaaataatacactattaatcaacaagttgctaataaattcaagccacacactctccaaaagacgtgtataggtgacactgacaccaaaaatgacacctattcactcgccagaaccttgccgatcaggattgatttagtaaatatatttctaatactatatcaatagtattagaagaagcaatgttctgtcctgaaagaagcaatgttctattcaaaagcattgctttatatgcgacataacattgcttcatattctatctcatgaaatcaagtttagagcctatttatcaaacagcccagttgcgcaatacaacatcctataacggagctcacgctctccaacatggttaacaaaagttgtaatcaatacaattttggataaaattcataaaaatattattgttttgattatttcctgtagaaaatactacctgcactcaaaactttcctatgcaaccgttgttgtaataatcccaacaggacgtacgcaaccaaaattagtattgggaaattttataaacaattatttttataggacatgaaaattaaacagttattattagcaggagtcgtaagtatagcattattctcttgcagtgacaaagacgatgtttctgtttcacaggacgaaataaaatccatttcagtatcattaggcggaatcaagacaagagcttcttctccaacagatatcatcacatcggatattaagaatgtgaacagtgtattaatcaatctgactgacgtaaatggaaaaatcataacttccaaagccgtcaccaaagatgaagtgcttaactccgactggaataaattgaccgatccagcaaaaggattgaagttcataaacattcccgaatccgtttctaaagtatatatttatggaaatcccgggaatgccgtaactaacaatgtagttaataccaagttagctaatcaacagggtagcgaagtgctttactatggtatggacgatgatctgaaacctatcgttaatgaaccgatagatccgactccgacagcaggtaagacttatacggcacaagtgaccatagcccctattgtagcccgactgcaaattaccaagatttcattcaagaattcaggtaacttcgattttacccgaaccattgacggaacagataaaaaagcaacagttagttggacaggattctcaggaaatgtaaaaggcttctatatgaataacttctataacacttacaagaatccgggaacaatggacaacctgcttctgaactcaactttcgaaggacatatccatgatggtatgtggactttcgacactaccccgatagtggatgcagctccgtttgccagctacattatatacaatgaagacggaacctacggcaacctgccactggatttagccggcaaatgttatgctttcaatttcttcccgggcacagccataccgcaattgcatttagatctttctgatttgaacatcaccggcctgaagtcatccgacacggaagtatttaacccggacttagcaaatggcgcacgctttgccaacctggtgaagtattataaagaagtaaatactgaactgacagcagccgacttcaaacccggtaccctttataatatggagatagagttagttccgatgctcgacaatgacttaggaaatgtacaatacaacgtactggtacacgtcacagtcgctccgtggaatgaagaaacaatcactccgggatttgatctggaacaataagtttcagactcaacaaaccctgaaatatgaaaaaggcaataattctatacatcctgctactggtaacagtgacagggtgtataaaagaaaaccttgatgattgtgagacaactttgtacttcagctacctgggtgatggaacaaaggaaatctttcctcagaaaatagaaaaggtagatatgtatatatacaatcagaacaatgtatttgtacagaaaacagttctcaaccggaaagagctcaaccgccaacgcggcactaccttgaatttgccaagcggtcaatatcacattatatgctggggaaactccctcaacgacacacggataaacgaaggttcatccttgcaaaacaaccttgtcggagccccgcattattttacgaaagagttgatatcgaccaatgacagtctgtattttggagaaagagagattacaattgtcaatgaaagctataaggttgacaccgtttatttcagcagtgcgcatataaaaatgcaaatagagctggaaggactggatgttggcagtacacgtgcagccacttcccccgtcagtatagaaatggggaaattaagttcaacagtggacttcaccaaaacgttttcaaacgaacgcgtctcttatttcccgttggtaacttttgaccccaacgtacaaaagtttggttcaaaattcaacgtattacgatttaatgatgataatgaagtatatctgcgattgcgcgaccttcagagcaatgaagaattatacaccatgcaattaaaggacttcatgaaagataataatattactgtaaatggcatcaatgaagctgcggtaggcatccgcatctatttcaatggaaccgccatcacagtaaaaccctgggacgaggaagtgatcagaccggggatataacccccaatgtatatgaagctaaaattaaaataccggttctgtttgcagttgtttgccatggcactgctgctatactcttgcagtgaaaacgagacgccgatatccgatacaaccgataatcaggcccggctaaactttctgatcaaaacggctcctacaaacaaagctttgattcatggagacgatggcagcttttccagtctggcactctatattttcaataaagcagaccagcactgtgaatattcggaactgattccggaattcaccccgcagagactggaagagttttcacgctctgtcaatgtgtcgccacagacaaaagtaatttatgcgattgctaattataacgatcccgataagaccttttctgttccggtgtctcccgaccttacattgcagcaattggaaagcctgacggtatccggcaacgcttttactgacagcaatatcctgatggtcggaaaaaaggaagttgcaatcaatagtgaatatgtagtagcggaagttcctatggaacgcctggtagcacggctggacatctatatgttcaagaatcagggattggagagttcgagtgtagttgtcaactccatagaatttgtcaatcagatacttaatacaaatagtagtccggaggtaacatcaatgccgacgcccattagcaagaagaatgtttcggaggtatttcttggaggaacaactctgcaacttatgccgtctgatttatctgaaatagtaccggagaatgcacatgcttcattctatacatatcgaaatatagttcctgacgctacaccggacgctaacactccctatatacgcataaaggcactgttcaacgggatcagttatacgtacaggggatatcttaccgaccaggggcagacaacccataagtacagtctgctgcataatacagtttaccgcgtcatggctatgctcgaccatccggacaaccagttaataataaaaacgactccctatccatgggagcttacctcgtctgaaatcggacaagagatcacggaggacgactatcagcttcaaccgtacaatggagatgacgccggtgccactacaggcatcgtgcaatttccctacatagcgaacggagaagcccataatgagacttcctacgccaactacagttttagtctgacagcccctgccggtgccatctggaccgctactctgaccaatggacttgactttacgttcggcatgaacggcggtctcaacgtttccaaaggaatagcccgtgatgaagcatatacgatacaggtaggagctaccaaacgatggagtgggaatcctaagagcacttacttctacataaccgcaggaggcgtgaaactcaagattaatccgaagcaaagcaatggcaaccgccagtttccgggcgacaacgacacggatattttaatccgccaaaccgaatataaataagatgaattatgaaacgaaataaactatatatcctcccgctgatactctcattattctggggactcacctcttgcgaggatgattcttccatcgaatcggcaggaacaggatcggtaagcggaattaccctgaaactgtctatgcccagctccgtggcttcgcgtgccgtagaagagccgggtgaagaagcgctcaatgaaaatacgataaaatcattagatgttttcgtttaccgtgaaggagcagacgaatgcctgttctaccagcattttgcgttttctcccgaactgaccggaaccggggaacatacagctaccctggatgccgcacaggagaaattcgatcagaacatcaaccataccatttatgtagtagccaaccatacggcaaccattccggctgcgggattatctcttccggaactgaaggcgctcaccgcccctactctggatgcagataaaaaacaagatacattcttaatggacggaaagcatacaatggtgctgaatgacggaatcatcgtcaacaaagagattcccgttgttcttaaacgcgcggccgccaagatcagaataagcctgaattatgtaaacggtttcacccccatagacaataatataccttcaaaaaagatggtcaactatgccgccagtggctcatccattgcagacggtagcgtaaatgcccccactctgcaaagcatgaactcatttacggaacaaaatacaggtgcaggcaatagcaatcaattcatcctctattcgtatgccaatgattggaccaaagatacgaatagagaaagttatgtactcatcaatgtccctgtaaaggacgctgatggtaacactactactcagaactattacaaaataccggtaaactatcggctatcggacggaagcacaggccagactgaaaatctctataaactggaacgtaaccgcctgtatgatatccgcgtgaacatagacaagaaaggtgataccgacccgcattccgcagttccgctgaatgccggatacaccatacaggattggagcacccacgaagtacttgtttccgtagaaggaatcaactttatctatgtaaaagataccaagatttcgatgcccaacagtacgcagttcaccactaccttccagtcatccacaccggatgtagaaatacagaagattactgtaaatggtgtatcggtttccaacggtggaaaagagataaccatcaccgctaccccgaatgtaaagtccggcaacataaccataacgagtcctcttcctgaaaacttcctagccaaagatatcacctttcaggtagtcaatggtgccggacttacacaacctgtcactgtctcccaatatccggccctctacatcggttctgacatttcagccgatgtccccggaggaagccaggggcaaaataatacgaagatgtatataatgaattccttcgtcgccgacttctctactcttcccaatccggacgagtttgacgaagacttcggtagcggatattcccattatgcagccaatcccgcattaggcgcatcttacgcttcgtacatacgtgacaatgccgtactcggttatccgctgacagacagtgaacacgcagccatagatacggaagaaaacaaccggagaatctctccgcacttcatgcttgcctcacaacatggtacgacaacggcaagcacatacaccgcatccagaatcaaatgccgggattatgtagagcgggatgccactaccggagaaacctattccgactggcgtatgcccacgcaagcggaaatctacctgatagatgtcttacagaacatacggatatgcgaagtaaaaggcatccttgaaggaaattattattggagttcgaatgcttccggtgctgttaacttcatggacccccgcgttggagaaggtggtaaattcagtccgctgaatgcatccgtccgatgcgtccgcgacatccggtaaacagtattgatggattaaaattagaaaagtatgaaacgattaacctaccttataacactcctcggtcttcttctggcttcgtgtacagatgaagatgctctcggcactcccctgactggaaatgacgataagaccgcctttcagttctcggtaaacatgcctgaatatataccggcactcacccgtgccgccacggatgagaatgctgttaacgacctgtggttgatgaccttcgataccaacggactattcatagggcgggctcatgcctcgctcctgagcagtaacagtaatggtaccgggacattccaggcaaatatacccgatgacgcaagaatcattcacctcattgccaattattcccaatgggatagttttgacgaacgtgccgccatgcagaaagatgaaagggagattataccttcattgaacagcaccaatttagtattctggggaagacaaacaatctcttccgccaatgacactcccaatgtcacactttaccgcaacctggccaaagtgactgtagaaaccgaagctacgaatttcgaagtaacaggatatgtgctctgtaactatgcaagtaacggaacggtggctccattcaacccgaatgcccccgctaccccgttcaccttgatagacggcacgccgaccttgcctcgcagtcccgtctccaaaatcgatcagacagaaacagactgtaacatggacgccaaatatatgttcgagaatgagaactattccaacgatcagacctacatcatcattaagggaaaactgacaggaaagaccgaagagctttattacaagatacagcttcttgatacggacaagaagccctaccccgtcatgaggaattaccactacaagattgtgataaaatccttcagcgagagtgcaaacggaagtactgaatttgccgatgctaaaacttcagaaccttccaataatatctatgccgagatattcaaggaatctccttctatctccgacaataacaacaatgtgctgacagtaagccgactacacttcctgttcacccaggcaggcaccttgaaggtatcagcccaatatacggccaacggcgtgactgataactctaaaatcagcgtatccatagccgaagatcagggaagcatacttcataatctctcttatgacggaaatgggaatatttctgccgatgtatcccgcatcattacgggacaatatgaggctacaattaccgttaaggcaggtgtactttcacgtaccatcacggtcatatccagtgcgttatatctgttcgatcccgccggattatcacccgaaatatacactgcccgtaaccaggacgtagcactgagcttcactattccatcggcaataccctactatttgtatccgttgaagtgtaccattaccacaggcaacctctatccggtagagcctaacaaaaacctgcaactggagtacactaacggagggtatcagtatgtctattgggccaccggtcccggaaccaaagtattgaacttccgtaccagtcttgaaaacagcgatgaaaccgttctgatagccaatgaaatcttccagacaaagagcgtggaagtaaaatcgcgccactttgccaatgtttccgtcaatggagacaatacggtaaattacggtgtgaacaatacagccagctttatgtttactattccatcatacccggattatccgcccacatacccgttaacggtgtttattgcaacccaaaatctgcaaaccacccaaagcggttggacagcagctgcaggtggttatcaacggacttacgcttcgcagccttcaggaggacaaaccgtcacgtttacctctaagaaagctttaagcagtgaaaagctgataatatccgctcccggattcagtcctacgaccattggctttgagaatattctggcgcagtcaataactgccagcaatacgatacaggtttatcagaataacggcttgctcaatatcccccgctatacggtaacctcatcagataccggcattgcatctggttttaccaccagccgcaccagcacttattcaacgaccatatacgccggagccaaattgaatgatgtggttactttcactctgaggaattataactattccgccacatataaagtggaagagttactgcaaaatccggctattgttttacgataatataatgtaatgaaaatatgaaaacgattaaattccttttattggcagccctgatgctcacatacaccatcagtacgtacggacaggacaaaagccactacatgcctaaatttgcaataaagaccaatgcattgtattgggctaccactacggctaaccttggatttgaggtcggactctccaagaagctgaccctcgatatatccggtaactacaatccctggaaattctcggatcacaaacaaatcaagcactggctggtacagcctgaacttcgttactggctgtgcgagcgcttctacggacatttcttcggcctgcacgcccattatgcagaagcgaatgtaagcaacctgaatatattaggtttgggacacgaacgctatcagggcaatatctatggagccggcatttcttatggatatcaatggatactgaacaagcgctggagcatggaagcggaaatcggtgtaggctacgcccgcatagactacgataagtacaactgcggcaagtgcggcagtaaactcgacagcggacacaaaaactacattggtcctaccaaggtagcattaaacatcatatacgtcataaaataatatagtcatgaaaaaaatactgatatactctgttttgtgcctcatagccgcacttccggtcagcgcgcaaaaattctataaagatgccatcaacatcaccaatgcctccctatggcaacagggagagtcgctctacataaacatgcagatggatatgcggaacctgaaagtcagcaatgaccgcaccctgacgctaactccagtactgacaggtacggataataatgtcgtattgccggaaatcgttatcaacggacgcagaaggcaaaagtcctatctacgtgccatggctttggataaggcaaccaatatggagattccttacaatactcaggaagttctgaactacacacaagtcatcccttacgaaccatggatggaaaatgcttatctgaatctggaagaaaatttatgcggatgcggagggcaccaggaggtactgacacaggaaatgattatgaacggagtttctacggagaccaaacgtctggctgcattgcaacctgtcccctcttacattcagccgaaagcagaagtagtaaaagcacgtagcgaacaatatgaagctcatctcgatttccccgtaggcaagtctgttattcttccggatttcatgaacaatcagacggagttgcggaatatccgggagatgttcaataaggtacagaatgacaagaagttgaccattaccgatgtttacattgaaggatttgcttcccccgaaggaccgcttaaactcaatgagcaactctctaagagccgtgccgaagcgttgaagaagtacctgtccgtacacgaacagatttctgccaatctctacaatgtctcctttggcggtgaaaattgggaaggactgataaaagctctggaagcctctaacatgaaagagaaaaccgaattcctcaatatcatccgaaacaccagcgatatagcccgccggaaagaggaaataaaacgtgtaggtggtggcgctccctatcgtacaatgctaaaggaattataccctgcactccgtaaagtgaattgccgcatagactatacgattgccaatttcaaagtagacgaaggaaaagagattatcaaaacacagccccagtatctcagtttgaacgagatgtatctggtggccaacagctatcccaaaggcagcgacgactttatcaaggttttcgacatcgctgtacgtatgtatcctgatgacgaagtagccaacttgaatgctgccgctgtagccttgtctaaaaaagatttgcccgatgcccgaaagtatctggataaatccaataaacagacagccgaatatgccaataataacggcatctactacctgctgagtggcaataaggatcaagctattgttgaatttaccaaagctgcccggaatggtaacgaagcagcccggtataatttggaagaaatagaaaaagtgataaagataaagaaataacagagagaatagaatagagaatccccggaactgattaaaattccggggattttctatttttatgtaccgcactcaattacgatgtaaaagtaaatcacacactgtttacttcaaagagaagctatgattttgcctcattagccaaacatcaggatagctacaccctttggtcaggatggtgtagccctaagcacaaaagggtgtagccattccgggcaaagggtgtagccttactatacgattgaaatagaaccgattacaaacgacttattcgtcaaaaagaaaaagcctgaattggggtaatggcagaagcttgtaacaaaagaagaaagagatagagatttatgaccaactttggcgaataatcctacccaaaatacccacaagtagggattgataaaaccaatattttcttccaactttgtaacaagaatcagataaaatgaaaagtttttatatagtattgcttattacgataacttggacgtcttctctaccggtacaagggcaggactctattaatataggaacccgccattctttattctccaacatactgaatgaagaaaggatgtactggatttataaaccggaaaaacaaccgggtgaagaagaaaaagactacccggttctctacttattggatggagatgtatttttccattccgtagtaggttttacccgtttctttgcttcttcaagggtttcttcattacccccttgtgttgtagtcgctgttttgaatacagaccgtaccagagatttcacccctaccagttcggctgcacgacgggatggcagtattcagcctggagatactccaaaaggtggagggatgaaggctttctatcgtttcctaactgaagaactgcgcccggaaatagaaaaaaaagtttctgccaacggccgtaatttcttagtaggacattcatacgcaggtttatttaccctacaggttctactcgactatcctgagtcgtttgataccttcatggcaatagatcccagtttatggtgggaccggggagttttcctgaagcaagccgagaaagaagttggtcagaaggacttttcgggaaaacaactctatgttgcctttgctacccgccaacgtcctaatgtgaagttggaccagttcgcattggctgacagtttaggagaaagaatcattccagagatgaagagccaacatctgcgcgctatatacaaaaagttcccggacgaagtgcatggtacaatagcccttccaggtatgtttgatggcctgaagtctttgttcatgcgttagtattgagacacatagcattttgttatgttctcttttatactgttaataatctgaatagtttcaactcttgaaaaaacagtagagcgggaagtttgttttaaatatagggaaaataagttccgattgatcgtaccatataatatagacctaaataaataaatagattatcatgaaaaaagaagtttctgaagtatttgaaaaagaacaatctaatgaaagctgcatccatctgtatctggaagaatgcggttggtgtgcttacgaagtttcagcttatctactaatgaaccttttaggaggaaaatgtatagtcgaaaaaatagagaaatgcggcttgaagcttgtccgcgcatttctgaacatagatttgctgggtggcatcaattatggcgaataccgctatgcgggcttaaactcctacaacctgcaattaataggaaaagataaagtcgataagaattcatttcttcattggaaaaagaatatataaaacatcatacaacagactttatcaataggatttttatatatctcccatattattgtaatgataatatgggagatatattttaatataacatcaattgtattacgcaattctcttgcaaaggattctgagattgtttaatatcccaattatgcttccttcttttcaaagaataaaaaaagtcctaattcttaacagaattaggacttctaatttagaactgagcggtgcgtacgggactcgaacccgtgaccccatgcgtgacaggcatgtattctaaccaactgaactaacgcaccataatttcatttcttttattgctttctctctcgattgcggttgcaaaggtaggtgtttttttgaaacctgcaatagcttgaaagaaatatttttcatcttttttaaagtaggcttgattataagatatttatattacctttgtgtggcaaaaaaaaatcgaatgacaaatcaaaatcaaataaaagcgagaaaaaccatgagaaatactcctattgaacgtaaactgattgacgaaaccatcgaagcatttcagattgcagactttggaaaagcaactatccgcgaagtaaaggcgattgccgccaaggcagaagctgaatctggcatagaatttataaaaatggaaatgggtgtgccgggacttcccccttcggctgtaggtgtaaaagctgaaatagaagctctgcaaaaaggaattgccagtctttatcctgacatcaacggattgcctgcactgaaagaagaagcttcgcgttttataaaagcatttattaatgtagatttgcaaccggaaggttgtgtacctgttaccggttccatgcaaggcacctttgcttcgttcctcacttgcagtcagtgtgatgaaaagaaagatacgatattgtttattgacccgggatttcctgtacagaagcaacagctagtcgttatgggacaaaagttcgagactttcgatgtatatgatttccgtggcaacaaattgaaagagaaactggaaagttacctcaagaaagggaatatctctgctatcgtctattccaacccgaacaatcccagctggatttgcttgaaagaagaagagctacgtatcatcggagaacttgctacgcaatatgatgttattgttctggaagacctggcttacttcgctatggacttccggcaagatttgagcaaaccattccaagcaccttatcaaccatcagtggcacattatacggacaactatgtattgctcatttccggctctaaagcattcagctatgccggacagcgtattggtgtcagctgcatttcaaacaagctctatcatcgctcttatcccggattgacaaaacgctatggtggcggcacattcggtacagtattcatccaccgtgtactctatgccctctcctccggtacgagtcattcggcacaatacgcgcttgccgccatgctgaaggctgctaacgaagggcagtacaacttccttgacgaagtgaaaatatatggtgaacgcgctcacaggctaaaagagatttttctgcgccacggttttcatctggtatatgacaatgaccttggtaatcccgtagccgatggcttctactttactatcggttatccggggatgaccagcggcgaactggctaaggaattgatgtactatggtgtcagcgccatatcactgattaccaccggtagccatcaggaaggtttgcgtgcctgtacttcattcatccaggatcatcaatatgcacaattagaagaacggatggcaatctttgcagaaaaccatccgatataatagaataaaagaataaacttaccaattagtgccggtatcccaccacaaacgggtgccggcattatcatctcctcccaaagctttcaccaatgcacggtattgctccggattttccgtttgtaatcctccgggaaagtttaaacggcgaatcataatttccgtatcaacgcagccatccttactatgattgaaacgaactggaaaaaggcgtggatatccggttctgcgctgctccgcccaggcttcacatccttcaggaaacattgccagccatttctgcgtaatgatcttctccaactttgtatcccggtctgctgtttcaatccacttcggtgagactttacaataggcttttatattattttcagcatcaaatgtatccacaaaatcaattggcaatttatcactattcaaatatgaatcagtctgcatgataccatactgatgtagagaggaagtaattcctttttcatagcatataccggcatcttcatctgtccagttcctcaaagcggcttcggcacgcagaaaccatacctcggcagcagtcataataaccgcatccgttgactgagtagtcttcagtttcgacaaacccatataattgctatgagagaagcaagtcccctgccggattccacgatactgtcctttaaacgactcatcctggcatgtagcaaaaaagacagtacgccgaggatcttcataaccgttcatgatagactccattggagcactcatataagtttcgttccacaccagattgagttctcccaacggattggtataccctttctttgtagataccgccaccggttcattttccgcttccaacgttccatattcattattaaaagctttcaggaactctgaacgggctttctcttcatccactgtagctattcgcattgcaagccgcattcttaatgaattggcaaaccttatccacgaaatgtattcgccatccatcagtatatcaaaacgggaaaactcagctgcttccggatttgactcggcataaccggtaagggtactcacagccgtatctaattcacaaaagaactctttataaaccgcttcttgtgtatcgggcatatattctgcgttaggatcagcaaaccgtgaataaatgataggaccatagtaatccgtaacgcgatgcatcacttccactttcagaatcttggtgactccgaagaaacccggatgtttctcacgcgttgcgttctccgactggtatatctgtggaaaaatatacgaataggtatgtccccacattgcactgttccaaccatcttgcaaattatagtccgaattatggctacctccattcaatggttttccatcatgcatatatccactgaacatatctgcattcaggttctgcgtcaactggaaaggccagttcttaccctttccataatcataattgaagtaaatgccctgctgaatcactcccagacgaataccatgttcattataatcaatctgcaaatcttcatccgtaattccggataaatccgtattgatatccttaaagtcacccgtgcaagaagttaaaactaacagagcaccgaatatccaactatatcttttcatatcaatcctcctctctcccattaaaattcacacttcaatgaaaagccccaactgcgcgttgttggcatcccatacacatcaataccttgattatcattaccggtagataacaccagatccggatcaaaaggcgccttcttataaaagaagaacaaattgcgggctataaaagaaacctgcgctttcttcaggactttagatttttccatccaggaagcaggtaactgataagacaatgaaagttctctcaaccggatgttggtcgcatcatacatataatattccgttgtccctgcgcgtccgcctacaatcttatagaatcccttcacgttctctatccgctgcccctccagcataacataaccattatcacgggcctttccggtaatttccgatacaccgtacaagtccatatccgcctgagtttgcgaaagcaccttaccaccgtaacgacaatctatcaggaaatagagagacaagtctttataagaaagcgtatgattccatcccagctggaacttcgggttggagtttccaacctttaccgtattcccgtcaccttctacttttggcaatcctgcattattcccttccgtctcataaacaatattaccggaagcatctctgacaaaagcttttccataaacatcgccaatcgatccaccttttatcagtttcatggcataactggaagaaaaactggtaggtccataaacaaattctttcaaatcttcatgcaaagcaactattttgttcctgttagaagcaaaattaagagtagtgctccacataaaatcttttgccatcacaggagtagcgtccaatgcgatttcccatccctggttctgaatgttaccggcattcacatagcggtaagcatatttgtcacccgccagcgtaggcaatttaaaaaactggttatgagtatttgttctatagaaagtgatattaaacccgatacggctgttcagaaaacgtccttctgcaccaatttcccacgaataattcatctccggttccatttccttgaaaggtgccgcatcattcgccagatattcaccaccggcagtgatatgggaagcggaattcgtaatatacaaaggaatatcattccccaccatactataagcagcacgcacctttgcatacgacacccattcaggtaaagtcagcagacggcttaggatcaacgaagtaccaactgaaggataaaaatatcccctgccttcgtgcttagtatgtgataaagtggaagaccagtcattgcgggccgtcaaatctatataggcactctctttataacccacctgcgccgtagcaaacagcgattgcagctgacggtgtgaatcaattttctggtcaagagctgctgaaccgttcattataatatttgccagagtaaatacattggcatagtacaaagaagctgttttggaatcataacgggtagaattagtagtcttatcagtaatacttcccccaaatgcaccatttactgagaaatcgccccatttcttcttcatcataagcatcaggtcaccataaaactggagatcctgataatccatttccaggtaacgtccgttagcaccggctaacgccggagccgtagaagcataaaatttctgacggactttatcgtcaatgcaatccacattgccacgggcctgtaccgtcaaccagtcatttacttgcaagtttgccgataaggagacaatggcatgcatacgcacttctttagtttgtatgcggttcgttatccaatacggattctgctcaaaatcttcataggcagtatgccagttctgtatattcaggtttctactttcatcgtacacttcgaaattatccctataatacgacaagtcctctccacggggaaaccgataaagccccaccaacgggttcatataaaatccgcctactgtcggtttgtttttagagacttgtcgcatcaaattcacattaccatccagtttcaaacgattattgaacatcacagaagtttccctgaatgtaatattatgcttggataagcgatttttatcaataatccctttaccggtagtattggcatatgaaaaataattctgcaatttctcattgccatggcttacggatacggaagtaatggaagtcactccggtagagaagaaatcattcagattatcgtatttcggcaagtcttttcgttctccccaactatccaccccatcacttactccataacgattttgcatttcgggtaaagaagatgctttatcgaacatcagactggtagaaaatgatatgctccgttgtccttgtgatttacctttcttggtcgtaatcaatatcacaccattacctgcctggctaccataaagtgccgctgcaggagcccctttcagaatacttatactttctatatcttccgagtttaagtttgagataccgtcaccgccatcgcggttacctgcattagccgttccgccaatggcactgaaagcctgttccgaagttgaatttaacataggaacaccatcaattacataaagaggttgattctccccggctaccgaacggattccgcgaatgtttactttagcggaagcacccagtcccgatgagacctgattaacctgcacaccggcagtcttaccggtcaatgaagttatcagattgggcattttaacccgtgtcagttcttcacttttcacctgactcattgcataggaaagagagtgctccttcttttcgatacccaatgcagtcacaactactttatccagttccaccgcatcttcctctaatacaatatccagaaatgtatgtccttttacgcttatctcctgcgtcttatatcccataaaagagaatctcagcaccgcatcatcagcaaccgtcagtgcaaatttgccttccaaatccgtcactgcaccattcgaagtacctttttccaacactgtagctcccggtaaaggcacaccgtctccatctacaacacgccccattatacttttccgagcgataagtacttcaagccgatggttcacatcgtctgcaacaaaagcacaacaagaactactatacgaaaaaaaataaccaaaaacaaaaaaacagatataattatagatagtcaatttcatgatttacaataaagagataacaatttgcaaaagtaaccaatttcttcctaataaaaacctgttatataacatatatgaaaattctatcagtgaaaaaagagaaataatatttgtttttcaaggatttgtctgtatattagtggcatggatattaacacagacatattcaaaattgaaacgaaccacgtattaccttcacgtggaaaagtactgatatccgagcctttcctctatgacgagatgttcggacgttctattatcctgctggtagaccatacgctggatggtacaatggggttggtattgaacaaatctctcccgctatatcttaatgacgtattgaaagacttcaaagatgtggaaaatatacctatttataaaggcggtccgttatgtaccgatacgctgttttaccttcatacactaaaaggtataaaagattctctgcaaataggaaaaggattctatctgaacggagattttgatgccatccgccgttatattttggcaggcaatgacatcaccggaaaaatacgcttcttcctgggatattcaggctgggaacatgaccagctatgccaggaaattgaagaaaacacctggctgataggatcgacaaacatcgcttcccttatggatgaaaagggaagcgcagaactttggaaaaatgttttgggagaactgggaggcaaatatcaaacatggtcacgcttcccgcagatacccacattgaattaatcaacccggatgcactgcagcaatgcaacatctttgaaataaccttctacacacaaccaatcttttaacaacccacactgagcaaagccgcaagaggcgaacaaacgcatgcttgcctcattatcggtggcgatatggacaaccaactgtttcatacgcagaaagtcgaaagcatagtcacaaagtagtgtcaatgcatcttttgcatagcctgcaccacgaaactctttccggataacgatacccacttctccgcgtgcatgcatcggagaaaagtctgtaatatcaatcgttcctatcgtagcatgatcttcaaggcgcaccaccatcatacgcagttgcttatcggaaaacatatcgcattgtgaattctccatatattgcttcatcacatagcgtgaatagggtacggtgaagttactgatatcccactgttgcggatcgttttccatctcacaaatcagttccagatcctccggttccatagcacgaaggcgaatacgttcgtttacaaaataaatatgtttcatgatcagagataacatttttcggaagtcaccagtacgcgactttccgggttataaattcccagacgcaatcccattttccggtggcgggacagcaagcggataattgtagaaaaagaaaaggcacggcaatcatacaccacatgcgtgaaacctttcagcgagatgaatggactggcatgtccgtcggcggcagatgcttcgtttgccacaacgaaatgatgctttccgatcagcccgttacgtttgaaaagtccacgcaaactatgaatagtggcttcttcaccgaaaacaagaaaacgagggaaagcttgtcctttaagaaagggaactttcgctttttttcccggaatactgaatatacgtctcaaggaaagcatcagcaaacgaatatacatctgtaaatggataccaacccgaacaagccaacgccccatgagcccataacgttcaccatgcttgcgaaagaaaatatccattgctccacaaaatacgcgcacatggtgataggtatctttcgatgtactttctcccttataatgcaatataggataaggcaagtagtaattttcatatcccgcctcctcaatccgacaggacaaatctatatcttcaccatacataaagaagtcttcatccagtaatccggatttttccaatgcagaacggcgcagcaacatgaatgcacctgccaatacttccacccggtgaatggcatccgcatccaaggcattacaataatacccacctaaacctttagaacgggggaaaagttttcccaagccggacagtttaccaaaagtggctgccaaagtaggatatccacgctttgattcccgcagaaaacgtccgtcatccgtcagcattttcacaccggcagctccgacgcaaggatgcgtgtccataaacagaagcgcttcttccaaagtctgctccggcaataccgtatcaggattcagcaacagcacgtattctcccttcgcttgacgaatggcctggttattagcacgggcaaaaccaacattctccttattatatatataggtaatacgcgggaaacgttcggtaaggtatgcctccgaatcatcgacggacgcattatctactacaaaaatttcggctgaaagattgtcaatagccctgtataaggaacaaagacactgttccagataatactttacattgtaattgactatgacaacagagaatttcatgcttcctcctctttattgatatgcaattctttacgtaaacggccttcgccgggcaagcagaacagcgaagccgtaagagcaataaaagcacaaagcaaacctttgttactcaatgttagataataaactgcaagacctacccataccggcagcgaaagcatagctacccgaactttactccagaaaaaatataaacgtaaagcttcaggcaaactaactttatcaatcttccgcgtcagcacccaggcgaaaagtttcaaagaaaccggcacgcaagcagcaaccagcaaaatagacaaagtttctgcaaaataagtcgtacggacatcagcggcatatatacctacccaatctccaccggtttcacctactatgatccatatcaccggcagcaaccagaaactgataaatattacttttaaacgactcgcaacgtgttttatctgttcttccattctcttataaacaatagacttaataacaataatttaattcgttcccgtaaaaagcgtccggtttacaatactacgtcccagagtgacttcgtccgcatattccaactcatcgcccactgaaatgccacgggcaatcacacttagcttcacccccatcttttcaagcttacgataaatatagaagtttgttgtgtcaccttccatcgtagtgctgagtgccaggatcacctccttgattccaccggcagccacacgccgtacaagactttctatctgcaagtcacccggccctaccccgtccattggtgaaataacaccacccaagacgtgatatagtccacggaattgctgcgtcgcttccaccgccatgacatcgcggatattctctacaacacaaactgtagatgcatcccgctgcggattggcacaaatacggcaagtttccgtatctgaaatattgtggcaaaccctgcaatatttcacttcatgcttcagtgtaacaatagcgttaccaaaggcttctaccactgccgtatcttgtctcagaaggtgtagtaccaagcgcatagcagtcttccgccccactcctggcagtttggcaaactcgctcaccgccttctccaataatatcgaggaaaattgtccgttcatactaagaaatcaactattggcggcaaagataatgcaaattgagtgcagaactttcatgcaagcatgaaaaagttatgccaaaatgcagcttatcttcttaaaagataattagatttccgcattccgaacatagatttttgaaataagtactacctttgcatacgcagaaaaaaagaaaaagagtaagaaactttctaaatttgacataaaaatggagattacaagcgctgaattcgtcattagtaacacagatgtgaaaaaatgtccccccggaatatttcctgaatatgcctttatcggacgttccaacgttggaaaatccagcctcatcaatatgctaacagggcgtaaaggacttgccatgacttccgccactccgggaaagactatgctcatcaatcatttccttattaataaaagctggtacatcgtcgatctacctggctatggttatgccagacgcggacaaaaaggaaaatcacaaatacagcgtatcatcgaagattatattctggaacgtgaacagatgaccaatctcttcttgcttattgactcacggcttgaaccacaagtcatcgatatcgaattcatgggatggctgggcgagcacggaatacctttctccattgtctttaccaaaggggataagctgaaaggcggtaggctgaacaccaatatccagcagtatctgaaaaaactaaaagagcaatgggaagaacttcccccttattttgtgacctcttctgagaacagaatgggcaaaaaagagttattagattatatagagagtattaataaagaattaaataccaaataaagtaatagtaaatatgaaaaagagtgtattttcactggcatttattgccaccttacttcttgtgtcggccaatagccaggcacaatcgctaaaagatttattcaacaaagaaaatgtagaaaaagtagtcagcgccgttaccggcaagaatactgttgatatgacaggtacatggtcgtacaccggtgccgctatcgaattcgaatcagacaacctgttgatgaaagccggcggagccgttgctgctaccactgccgaagccaaactcaatgaacaactgagcaaagtgggtatcaaacccggacaaatgagttttaccttcaatgccgacagcactttcaatgctaaactgggaaccaaaactctgaacgggacttatatgtataacgctaccgaaaagcatgtaaccatgaagttcgtcagactgataaacatgaatgccaaagttaactgtacatccggcagcatggatttactgtttgagtcggacaaactactgaagctaatcactttcctttccagcaagagcagcaatgccacactgaaaacaatcagttcactagcaaacagttacgacggcatgatgctaggcttctcacttgagaagaaagaataaaacggaatatcaataaaaaagaggttgtgtcaaaatgctggcacaccctctttttatgcgcaaagcccagactttctcaagcccgggctttgttattacccaaaatttttgtaactttaggcataaagtttttcgttatggcaaagttacattttcgtccttacattcccaaccaaaccgttctttttccacaaagaattgatgaaaacatagctgcggacgatcctgtccgcatagtcaatgcagttgttgataatcttaatcttgataatttcaagaagctttataaagaagcggggcgctcagcttatcatcctaaaatgatgcttaaggtaattatctacgcttacatgaataatatctattcctgccgtaaaatagagaagcttcttttgcgtgatatccattatatctggcttgccggtcatgagcatccggatttcataaccatcaaccgtttccgtaaccgtgtaaaggaggagataaacaacgtcttcacgcagttggttcttgtcctagctgacaagggtttcatcagtcttgacgtagagtatatcgacggcaccaagattgagtccaaggccaacaaatatacttttgtctggcgcaaaacagtcgaaaagaaccgtacaaggttgctgaataagattcgcatccttctggagcaggtggatgaagccattgtgcaggagaactctgtaaaagacacatccgtggagttgactcccgccatgctctctaatatagtggatgaactcaaagaagtgctggaacaccagcctgcaacacaggacaaggaacaaaagaaagctctgcgtgaaaaaaagaaacaggtcagagaacttgaagggtatcgtgacaagctgatggaatacgacaatcaccttgaagtccttggagaacgtaattcctattccaagaccgatcctgatgccacattcatgcgtatgaaagaagacgccatgaagaacgggcagaccaagcccgggtataatttacaaacaggcactgaaaaccagttcatcatagacttccggctgtttcccaaccccaccgatacgctgaccctgatccctttcttccactccttccagcaccgctataaccgcttaccgggtatcggtgtggcagactccggttacggctcggaagaaaattaccggttcatgcaggaaaacgggatagaggcctttgtcaagtacaactacttccataaagagcagcgtccccgttatactcccaacccgttccatgcggaaagtctccattacaatgcgggggaggattattacgtttgtacgatggggcaacacatgaaccgcataggaaccagacgtgacaaaacagcgagcggatacatcaccgaaagtgcccggtacaaagcacaaagatgcgaaggctgtcctttgcgtggaagttgttttaaagcacaggggaaccgtattatagaagtcaaccaccggttaaaccaatataaacggcaggcacgggaaaggttactctcagaagaaggaatcaggcatagaggcaggcggtgtatagaaccggaagctgttttcggacaaatgaaatacaacatggcatacaggaggttccggcatgtgggagaagacaaggtgacaatggactttgccttctttgccatagcttttaatatcaaaaagatgtgtgcaagactgagaaaagcaggaaaggagttcattacacttgctaaatctatatttattgggctatttataactcgatacaacgggaatatagcaacttgttaccaaatgaatgagaaaaaagcggcgtagacaaaaggaaatatagcaggactgtaaatcatcaaaaaaggttgtgccaacgttttgacacaacctcttttttattctcaatggagcggaaaacgagactcgaactcgcgaccctaaccttggcaaggttatgctctaccaactgagctatttccgcattagatgactctcttttcacaaagagaaagtgcccagaacaggactcgaacctgcatgcctctcgacacacgcacctgaaacgtgcgcgtctaccaattccgccacctgggcattatcagtcatccagacaaaaacaaaaaaaatgagcggaaaacgagactcgaactcgcgaccctaaccttggcaaggttatgctctaccaactgagctatttccgcattatgataatcgtgtgaagaggaggagactcgaactcccacaacatttctgtcactaccacctcaaagtagcgcgtctaccaattccgccacctctccatactatctcatactttcaaagaactaaaatttgcctcacctaatgtgcccagaacaggactcgaacctgcatgcctctcgacacacgcacctgaaacgtgcgcgtctaccaattccgccacctgggcattaggtaattgcaatctatgtacttgagcggaaaacgagactcgaactcgcgaccctaaccttggcaaggttatgctctaccaactgagctatttccgcgtttgcggttgcaaaggtagatattttctccaaacctgcaaacattctacttatttttttcgcgaagaaaaatacacatttaccatacgaaagcggcaggcttttgattatcaactcattctgtcgcgataatcctcgtaagaaaattgcttgaaaatatcagctttcctctctttggtccacatagcaatagcaggatggtgaattccattgaacatatttgttttcaccatggtataatgtatcatgtcttcgaaaacaatacgctctccgatttgcaattcatggtcgaagctccagtcgcccatatagtcaccactcaaacatgaatttccacccaggcgatacacatgacaaccaccattatttcctatttcagcaccacgtacggcaggctggtaaggcatttcaagacagtcgggcatatgacaggtaaaactcacattaagaatggcagtacggataccacgacttactacaatatctactacttcagaaaccaatacgccggtttgccaagtaaaggcagaacctggttcaaggataatacgcaaatgaggataacgagcacgcaaatctttcagcagttgaataagatgctccacgtcataatctttacgcgtcatcagatgaccacctcccagattcaaccacttgatttgcggaaaccagcgagagaatttttcttccaaatgttttaatgtccgttccagttcataagatgaagattcgcaatgacaatgacaatggaaaccttcaataccttgcggcagcacctcagtcaataaatccgccgtcataccgaaacgggtgccgggagcacaaggattataaagttccgtttccacttcggaatattccggattgatgcgaataccgcaagaaatgccacttccctctttcactacctctggataaaaacgacagaactgcgacaaagaattaaaagttatatgactactacaacgcatgatttcaggaaaatcagcttccgtataagcgggagaataagtatgtgccttactaccgaattcttccagtgccagacgtgcctcgtaaacagaacttgctgtagaatgctctatgtactccctaaatataggaaacgagcgccacatagcaaaagacttaaatgccaggatgatctctactccggcacggtcagcaacactttttatgagagtgaggttctttctcaacaattcttcatccatgatatagcacggagaaggaaaacaattgaaatctatcatattttctttttttaaccaatgatcttaaaacgggcaaagcgcaataaaagttgtttgtcgcccgcatttttgaagtgaatggtagctttggcattatcgccctgaccttccactttcatcacttctcccagaccgaaacgttcatgctcgatcagttgtcccggctgcacagccattacagaagcagaggtgggggtagaagaagaggctgccggagtcacccgtttcagattgcgcggaacgcttggagctataatatgctgtttggaacgctgcggagtttctttttccgtattatacaatgattcacgaacatgaggtgagcgagagaaaccgccgctatgttccctacggaaagatccggcctcttcatcaattttactaccaatccctgcgtcctgaggcaagcggaggaagcggatgtcgatatctttcagaaaacgactggggctaccaaattccattttcccataacggaaacgagtacgtgcgtacgaaaggaaacaatgttcttctgcgcgagtgatagccacataaaacaaacgcctctcctcttccagcgcacggggagaatctccgaccataccactgggaaaaagattttcttccattcccaccacaaatacatttctaaattccagccctttggcagaatgaacggtcataagcgttattttctcatcatctccattgtccgagtcctgatcagtcagcaatgatacttccgataaaaagtccgtcaatgaaatattcagattaccctcttccatgcgcaaagcacagaaatcgctcataccattcactaattcctcaatattctctttgcgactaagattttccggtgaattatcttggcagacgtcattaataatgccggactgacggatgatttccgtaccaatctcataggcatttttctccactgctccttctataaatccaccaatcaggtcacggaagatttgcaatttagagtacgtgcctttattgaaattcaatccgtatgtcagcggctcacaaagcacagcccaaagactgatattgttttccgtagcagcagtaataattttacctactgtcgtatctccgataccacgggccggataattgataatacgcttgaatgcttcttcatcattaggattaaccaccagccggaagtaagctatcacatccttaatctctttacgctgatagaaggatagaccgccataaatgcgataaggcataccccgcttacgcatagcttcctcaaatacacggctctgcgcattggtccgataaagtatggcaaaatctgaataggcataatgctccgaacggcgcaactcagcaatcttattgactacaatatctccttcttccacatcactatatgcctgaaacaccccgatggcttcccctttctctttttcagagaagacctccttgcgtatctgtctctcattcttttcaatcaggctgttggcagcacagacaatagtttgcgtagaccgatagttctgttccagcttgaatactttcgtattgggatacacttttgtaaaatacaatatattgtcaatatctgctcctcggaaagaatagatactctgcgcatcatcccctaccacacacacatgctgatgatcttttgccaactgcaacacaatgctgtgctgggcatagttggtatcttgatattcatctaccagaatgtagcgaaactgctcctgataacgtgccagtacttcgggatgatctctgaaaagaataaaagtataaaagagtaaatcatcaaaatccatggcatccgcctgcctgcaacgatcccaataacgatggtaaatatcccggatcgcaggcatcttggcagcacaatcaccttcataagcctccttattagaggcatatcccgcaggagaaaccaagtggttcttcgcattcgagatacgtgcctgcacactacctggtttatagactttctcatccagccccatttcttttatgatagagcgtaccagacttttactgtctgccgtatcatagatggtaaactgtgaggtaaaaccaatattcgcagcttccgcatgcagaatacgtagaaatatggagtggaacgtacccatccataaatggcgtgcccgttgatctcccacctgccgggcaatacgttctttcatttcacgggcagctttattagtaaaggtcaaagccaatatattccatggctgataaccattctccaacaaatatgctatcttgtaggtcagcacccgtgtctttccagaacctgcaccggctataaccaatgacggaccttcgttgtagagcactgcagcgcgctgtccttcattcaattcttcgatataattcgcattcatgtatgcaaaattaaaagaatctttttatatttgtacaatgttattcaaactaaaatcataagaaactatggaacaaattaaaaatatgcgactttacatttcttttatctgcctgttggtcttctcatgtgcttcgcctgtaatggcgcaaaagcaaagtaaagtagaaaagctcttgaaatttcttgtaaacaatgagaatgagaaatttacaaaaaaccgggacaaattagatgctgaaacagcaacagcttttgaagcagaagtcaaactaatcgatttgtgcgatcaaatctggaatcagcaagaggtaaccgttgccaaagattttttccaggcttatgtagatgctaccaaagccaactttatttccatctgtcaggaagccggtgctgatccggccgcaatccgtaaacgtatggaagataacatcagtgccatattagatgaatatcccaataaattagcctattccagcactctggtagatgccgtaaaagcatcaggatatgaattgtccgatgaaagcagaaaacatctgtatgatgtacatgaagaggaattatggaaagatttcgtacgcaataagaacattccgaaatgcgaaagatatctgactgaatatgctgatggtaagtataaaacagaagctatgatagaatacaatcgtctgctgttccaaaccgtacagaaatcaccatccgccagtaactttaagagattcttcgatcatgaccggctcaacacattcttcgacggacgttccaagcgggagtctatggcacaggctctctccatttatgatgattatctttacggtaacatctgcaaagcgcaggccatagcttccattaagcaggctattgcagaatatgagcaggccccttatttgagtccaggcgataaaaaatataccaatactctggagtacaaaaaagacagtattgactatgagacactaaagctggaagtgaactctccaagcaaactgggactcatcaaagaatacctcctaactcataaatacaaggaattccgtgataaagccaacaagttacgcgtaccttttgagcaacaattgatatggagtaatcctactaccatccaggcatacacccatggattattgatgaaatccaatgagacgaagaatggaaagagtacccagaaaacctatacgtatgatgaaaacggaagactggttagtatcaaggaagttacggaagataagggaaccactaccctacagactaatttcttgtatgattctcaaggtaactgcgtagaagaagtgcaggtaaaccaaagaggcatgaaggaggtgtacaaacgcctgcgtgctttcagtacactgggtgtcattctttcggattctgctttctatcagagcggaaaactgatcgtaagaaaatatcatccacaactcggtctgctggcaggagagacagtttacgagaaaaacattccggtatcttccgtaatcaaccaatataataagaagggacagatcatcaagagagaagagacattcccattgcccaaagatccgttacccacccaggtaagtaaacaagtggatgtatatgaatacgatacttatggttatctgacaaagatcacatttgaaaagactcttgtcaatagtgataagaccagcggttcactcatattcttgtatgacgaattcggtaaccaaatagacagtaatgcctattatgaatatgacagtaccggacgctggatacaaaagacagatcggggagatgccaagaatacagaaaagattcagattatctatcagcaataaccataaaaaataccgtccgcataatgaaatacggacggtatttttatataatcactctattttatgataatcgctgcgcaatttcctgaatagaaaaagagccttccaaagtacgaacctgtatctttccatgcaacaagttaaagaagaaatcagctaccttctccggaataatttcacaaagctctccattcgcatcaactcccagatcataggttttcagcaattgacttcccaacgccgtagctcctatcaggaaatgatttctcaatttatccacattgaccagatccgcagccaacacctttcctactaccgaatagcaatgcaccagtaccttttcgtctccttcaaacagttgagattcttgttcgtcagaataggtattcatctctataatacctgtattttccatctcgggagttcctttataaagagcgcccaaatccgccagacttaaattgaacaggcgagcttcactcgtgacttgcatttcttcgccactgaatgcgctgggtaacagcaactttatatccccactaacagctacattcttcgcattgaaagttcccactatacagtctttcatggtcaacttagccgtagcaaaaactcctcccaatactatacagtcctccaatatcacctcatccgcaaaaatactgccggcaacgaaagcattgcacaattttacagtctttccgttgatgtcagccatgaacatcggacggcaatcacgagcatacgacaccagagaatccgaagtggctaccgtcttacgcaagataatatcccctttcgcattattgctgatatggaattcaagcttagtgaacaccgcaccaagtatttccacatctccattctgtatttccagcttgcgggcataaacagccccttctacaatggtatcgttctgtatcagcacatccctttccagttcagcagatgtacgggggagaatagaaccttttaccagattctcacttaaaatcactccattctccaaacttattactttcaattctttcataactctacttctattttatagaacataagtaacggtatttacgataaaaaattcccggcaagtttcctcatcattccggctacccgtttttcatgttctgaagaacctaatctttgaatctctctctccagatgctttccaatgcgctgcttatcttcttgtgtcatggcaggcatggacgcttgctgaacattctgacgtactttccagtcattgactcccatacgtgcagtctgttcattcatcacgacctcagtttctttactgccaccagcaacagtcttctctactactaccaccggcaacatccaacgggcatttttacatccgccaatcaacacatgttctatatgactggccaattgcttttgcccaagcagatattgcttggcactctctatcaatccggcagcccgctgcttcactgtgatagcagaaatacgtgcctgtacatccaactgctctttatgcccaactaatgccattgccgacagagatgagtccgtattgcgcaactgttccttgcggctgctttccacaaagcggaagcaaggttccatcaacatgtgaatacgttgcaccaactctctgtccaaattctcaaaaacagcggagtaacgggtagtcagaatatcatagtcgtctatcatcaccaacttacgattggcaagttcatcagactgagactgtaattcggcaactacggcttccacattcgagcactcttccatattttgcatatccagactggcagtgatatatcccaaaaagcctttggatatatgtttaccgatttgctgagtactggctatcttatgggcaacttcagctgcattacatgccacaacagagttacgcaagctttcaatatgtttactgcaatcgtgtacgctactgttataaggattgtcgtctatttccagatagatatcaatcggctcttccagaactacagtcttggaagctgacttatcgcctacggtgagtgtcaccgtttcgctcttccggatcacatcatgtaagatatgtcttcgtcctcccataatcaaccctccttcacattaagccaggtttcattccgggccataagtttcttcatgttctccttcactctttcatttagatcggaagttgcaatcagtcgttccagctttccagccaccatccgttgcgattctatagaaacattttcccatccggaaccttcaaccgtgcgttccatattttcccgtatcttcgtgcatgagcgttgcccaattaattgttcaagtcctgaaggcagtttcgtttccaccacttctcctctatctccttttttcaccaacatgatagcaggcaaatagcgaagaacagacttaccaacaaaggagttcagctttattctttgcattttagcgctttgctgcttgcatgtagtgagaaaattagtcatttgtgcaattaaagcttgcgcattacgcttaatatgggcggcggcaatagcttgtgtagtagccagagattccgtctgattaaccggaacggtaccaatcagattattcagacggttcaaagtaatggcaacatcccactcgcagaatcgaataacaggtttgtccaactcatgaacacgattatgcagagctacatcaagtcctcggaataacttagaataacgctctgtcagaatcacaaagtcatctcccattctctttttcaaatcaagcaacgcctcttgttgctgtatcaattcggacgcatacgcatttaccgagcttaacgctgtggcatttttctgttctatctgagaagtaactagagagaaaaagcctttattaagccgtttgcacagtttgttcgtagcatccctttcggcagcaataacagccgcctccatagcaaccactgctgttgtgaccccggagaccttattagatacagtatctattttattggccatgtcgcgggtatccactgtaacatcatattttgccataatctttcattttcaagtttatgaatgctatttctctttctccagatcgctaaagtcatccaaatcgtccagatcatccaagtcgtccaaatcactcagatcgtccaactcgtccgctgtctccgatgctttaggagtttcatgaacttccggagccgttgttgtctctgtattttccggaacttccggctgtacaggttccacagcttcagccaccggagccattctaatagttttttccgcttcttccgcaacttcgggttgtgccgccggttcatccacgtttacggtttcagtcacttttgcactttgaggagcatatcctgaatagtccatagcctcgctgtcatccactaattcagcatgatgattgaacacaacatcctgtccttgctcagcaatttcatgcaatgagtcggtagctacctgagctatatccaaagtcatatattcttccacacaatcctcaacagcaggagcaggcggaatattcgaagcaaatgcataaaaaggattgatgcctgccaaaggacggcgacgatcatccaacaaagctacattatcattagcatccacgatttcctttgccattttatcgcgaagactggcatcaaagaattcaatgaatccataaacttttgcccgttcattaatatcactctgcaaagctttcatatattccttgaactcttcctgagtttgtttgaatgattcagactgttcggcaaattgctgcaaattactttccagcttatctccagcattctcctccaactcctgagcatctccatccatcatttgttgcaacatccgtgccttcatacgatccagacgttcaaaagtggattgtgcagcaaggaattttgtcaagttgctacgcataatattaatcaaatcatctccggaagtccggttacgcccataaaagtcttgagtttcccggtgccattgattcagataatcacgcttctgattatcaatgtcattatagatatccaaacggttcagtcgtgtttccgctaacagattctgtacgataggtgctacgatttcttcttgtatctggctgataccataaggcattgtcgtacggcttccgtcttctgcaacccacgaatgatccttcatatcatagcgcattcgtgaactttccttcaattggaaaggtgtgtagttctccaccgtatcgcggaagttgaaattcgtctggcggattttctccagctcatccttctccaacttcggtgaatagtgattataagaggttttcagaatggtgaacagcaattgattagaactttccaccagcgaattagtggatttaaccttcgctgccgcaattgtctgtactgcataccccacgtttgaaatcaaacggcgtaatacatcttcaaattgctcgctctggtcagacaatgaatggcgcattgcattcagcgaattaaattgctctatttccttatcatacgctgccgtatcaaatacattcagcacaggcgctcccgacggattggccgtaccatattcattcaaataagaaataaccggcgaatcgggaggaatgacaggcatgcctacagaaacagtatgcaagtccgacaagaaataagcactgtcacgcagattacgatccatacgtccaaagtaatcatagaacttcactttaggtatagatgttgaataatcctctgtggaaacttcttccactcccttactttcttctaccaaaggagccgtagtggagagttcatccagttctctcaatttctcggaaagtgctccctggttattaactaattgcagttcaaagttctgtactgaactatttccggtatgatctatcacaaagctcttattctcgaaaggaacctgactggcaacggggacataaaccacccccatcttttcaatcttatagtctctgaaaatctgctgatgcttgttttccagttctttcaactccactccgacatcatcaatggatttaccgctggatttaaacagcttgtagtttttcatcccccaataaagaccggctactgcaatagcaatacttagccacccaattactgctatcaatgcaagaccgacaacaagaattccaattcctacgtacatctgcgtctgggcttttttcttacccgtagcattcatagtcaacgaattctttaattctcccatctccttttctaattcttcttcttgcgacactattttttctgccgcatctttataaaaatcaaaaaggattttcgcttgatcctgatacaaatcttgcgaagaagaaaaaacctttcctttcataaccagatatgtttttatagtaaataaataagaatttaatttctaattgtaacctagctccaacagcttacgctcggccattgaaaagcctttcgctttagctttccggtaccacataacagcttcgaagatatcaatatcaacgccttttcctgtttcatacatgatacccagacaatattgtgcttctgcatttccggcattggctaaagatttataaatatcgaatgctttcttgtaatcaccattctgcgttgcttcccgagctgcttccaaagagttagtctgagcttttttctctgttttctcaggttcggcctgttgttgaggttcattaacaggagtctttgcctccggctgggctttaggttgaggttgttcttcaactttaggctgcttttgctgccctacagccttaaccggagtttcctcaggagtagcaacaggcgccacagtcgtggtatcctgcaccacagtaatagtgtcagtaaccacagccggaggtgcaacaactggcttaggtttggatgcaaacacaaaatacaaacagatcaaaaccaagatcagaaatatacagccacctattatatatatagattttctggatttcttttgaatagcaggagcttcttcttttctttccggatccggctgcttcacttcaggctctggcgattttatttccggttgatttgattcaacaacaaccggctcactttgcttcatttccggttcagcctgtacaacttccggttcaacctgttttacatctgcttctgcaagttctggtttatcctcaataggttctggtttatcctcaataggttctgattttgcttcaacaagttccggttttgcttcagtaggttcggaaacaacttcagcaggttcactctctaccgattctatttccggttctacttgttcgacctccggttccgtttgttctattgccggttcaaccaattcatccgcaatctcagtatttttctcttctatctcttcaaggacttcttccgttttttcctcaatagcctctacttcctctggttgaccttcctcaatcaatgatatttccgctggaatatccagtacaatagtctcttgccctgactttctataaaatgcatctaaaataccccgaataatactaaagtaataaacttcctccttaaacagtgatggaaaattcaaatacaactgttcagccatcttccaatacaattctttatcggaagtattgtcacaagtatcaaacaaattattcgcttctttcaataaaggcaagaaacgtaaattgattcgaagcactttcagtctaagtacattcaggaaattcgcctcacataaatcagcatattcattcaggtacttcaccaatttaggcaccttttctgcataaggttttatttgaatacgcagcttgttgatagcctgttggcacacctcactatctgcctgaggcttcttgaagttttcagcaagcacagccagctccggagctattttctttagaataacatgttccacattcttctgaagggtagaccgcaaaagttgaaagcgttctgcatctttcaagtttaaaacaaacttctgagggaacagatctttcctgattgcctccagcatagccaccaatgaaacattatccacctccaaagcagcagcaatgctttcgcactcttttaaagtaaactttccactcttttcaataataacccgacggattttagttatctcatccaacaaatatgttctattcataataccaaattcataaaaagtctctaaaaatacatattattttcaccaaaacaactcttttcacgactttttcactcatatatgcctatttctcacggttttccgtgacaaactatattttactttggaaaaattaatagaatctgagagaacatttataagataccaaacgttatattaacaaaaccataattcaagacaaattatgaatacgttattaacatctttaatgcttataattatgactcacgaaatgccgaaacttccgtatgcaaataatgcattggaacctgtaatcagtcagcaaaccatagattttcactatggtaaacacttacagacatacgtaaataacctcaataacctggtaccgggtacagagtatgaaaacaaagatctagtgactatagtagccactgcaccggatggagcaattttcaataatgccggacaagtattaaatcataccctctacttcctgcaattttccccgaaacccactcaaagcgagcctacaggaaaattagcagaagccatcaaacgcgactttggaagctttgacaacttcaagaaagaattcacagctgccgctgtaggattgttcggatcaggttgggcttggttatcagtagataaaaatggtaaattacatattaccaaagaagccaatggcagtaaccctgtacgttcaggatttacccccttgctaggctttgatgtttgggaacactcctactatctcgattatcaaaatcgccgtgccgatcatgtaaatgctctttggggtatcattgattggaatgtagtaggcagccggatgaaataacaacaacatcataaactctttttcaaaaaacgcacctgcgggaattatcagtcccaaaggtgtgttttgcatatcctatctaacatattttaaagaaaaacgttggctactaaaagcttttatcattaactttgctaacataaacgtttatcaaaagaaatgaagctcattgtagtcacagcacccacattttttgtggaagaagacaagattatcacggcactctttgaagaggggttggatattctacatctgcgaaaaccggaaacacctgcaatgtattccgagcgactcttaacgttgataccagaaaaatatcacaggcgtatcgtcactcatgagcacttttatctaaaagaagaattcgacctcatgggcattcacttaaatacgcgcaatccacatgaaccgcatgactattcagggcatgtcagttatacctgccattctgtagaagaagtaaaaagtaaaaaacatttttacgactatgtattcatgagtcccgtttatgactgcatatccaaggaaggaattctctctggctacacacccgaagaattgcgtgcggcaggaaaagaaagaatcatcgatactaaagtcatggctttaggtggaattactcccgacaatattctggaaataaaagatttcggattcggaggtgcggtagtactcggtgacttatggaacaaatttaatgtctgtacagaccgggattatctgggcgtaatccgccactttaagaaactaaaagaaatggcggattaaaaagttaaaaaacatctatattaaaatttcccatattccctatactctgcactggcaggtaaagtaaagtagaaagtagatccctctccttttttcgactctacaccaatgccaccaccatagtgctctacaatggattttgtgatggaaagacctaaacctgtaccacgaatattatagttcatctttacaaagcgctcaaaaatagcacggcggctttcttcatcaataccgcaacctgtatcagctacgtaaaagtaaaaactatcattactcagacgacggtatccaattctgacactaccttgttctgtaaacttcaatgcattctttaccagattattaatcacctgcgcaaaacgtacccgatcaatcattaaacgacattgaggcagtttctctacaaactcgatctgaatacccgatggtctgggatgtgcattctccgcagcacatatttcctgaatcaatgcatttacatccacatctccatctttatattccattgtattggcctctattttcgaaaaatccaataaatcattgatcatctgaaccaggaagtttttattatcattgatttctttcagaaaaatcatccgctcttctctacttaaattatcagtttcggcaagcacatttgtaaatcctacgatagcattgagcggcgtacgtatttcatgcgtcatattggcaataaaggcattcttcaattgattgctttcctctgccacttcattcagttgctgcaatgttttcaaacgcttggttttattgatggacacaacaatcataataaccagaagcaataaaataataaccccaaaacaaagcagcagtatttcattcttctgaaaaaaatcagtagcccaaagagcatataatgtagaaaaatccagattcataaagttggtgattaaaatattaggtaatcagacagtttaagtgatggcaaagataataaagaaaaaacaaatatttgattattagatacatgtttttccaaaaagataggctgtaaacctatttaaaaaaggtttacagcctataaatataagattttagagtattttatttcaaatcttcaatagccgcctgtgccgccgctaaccgtgctatgggcactctgaacggagaacagctcacataattcaaaccaactttatggcagaacttcacagaagaaggctcaccaccatgttcaccacagatgccgcacttcaaatccggacggatagcccgacctttttcagtagccatacgcaccagctgtcccacaccgttctggtcaagaacctggaacgggtctactttcaagattttcttttccagataaaccgggaggaaggaagcaatatcgtcacgtgaataaccaaatgtcatctgtgtcaagtcattcgtaccgaatgagaagaactcagcagaagaagcaatacggtcggcagtcaaggcagcacgaggtatttcaatcattgtacccaccttaaagtcaatactgtcacccacttcagcgaaaagtgcagcagcttcttcacgaatcaccttttcctgttctttaaactcatacaagataccagtcagcggaaccatgatttccggatgtgtttccacgccttccttcttcagttccaaagcagcaccaagaatggcacgcgtctgcatctgagtaatctcaggatatgtattacccaaacgacatccacggtgtcccaacatcgggttatgttcgcaaagcgattctacacgttgctggatatagtgcaggctaacacccatagcatccgccatttcctgctgacctttcagatcgtggggaacgaactcatgcaaaggaggatcaagcagacgaactgttaccggacaaccttccatagcttggaagatccccttaaagtcagcttgctggtagggcaatatcttagccaacgctttgcgacgtccttccgcatcttccgcaagaatcatctcacgcatagccttaatcttttcaccttcaaagaacatgtgttccgtgcggcaaagaccgataccaatagcaccaaagttgcgagccacagcagcatcatgaggagtatccgcattggtacgaacctggagtttcgtatacttatcagctagatccatcagttctgcgaaatctcctgaaagttcagcagccttcgtttctacctgacctttataaaccacacctgtactaccattcaatgaaatataatcgccttctttcagcagaacaccatctatttctaccgtacgagccttatagtcaatattcaaagcaccggcacccgacacacaacacttacccataccacgggccactactgctgcatgagacgtcataccaccacgggcagtaagaataccctctgcaactgccataccggccaagtcttcgggagaagtttcgatacgtaccattataatacgcttaccggcagcatgccattctgcagcatcatctgcaaagaacacaatttgtccagtagcagcacccggagatgcaggaagaccgcgagtcagaacttttgcttgtttcaaagcagtcttatcaaatacaggatgaagcaattcatccaatttattgggctcacagcgcatcaaagctgttttttcatcaatcataccctgatgcagcaaatccattgcaatctttaccatagctgcaccggtacgtttaccattacgcgtctgaaggaaccaaagcttaccttcctgaacggtaaactccatatcctgcatgtccttatagtggttttccaatttagtttgcagcatatccagctctttatagatttccggcatagcctcttccatggacggatatttagcagcacgctcttcttcgctaacacctgcaagttctgcccagcgttgcgaaccaacctttgtaatctgttgcggagtacggatacctgccacaacgtcttcaccctgtgcattgatcagatattcaccattaaacaagtcttcacccgtaccggcatcgcggctgaaacaaacacctgtagctgaagtttcgcccatattgccgaataccattgcctgtacgttgacagctgtaccccactcatcgggtatactttccatcttacgatacagaatagcacgttcgttcatccaggagttaaatactgcgcaaacagcaccccacaactgctcataagcacaagccgggaaatcttttccggtttgctccttcacggcagctttaaacttcttcaccaattctttgaggtcttccacttccaattcgttatccagcttcacacctttcgcatgcttcacttcttcaatgatagcttcgaacggatcgatatcctccttattagtcggtttcatacccaataccacgtcaccatacatctgtacgaaacgacggtaagagtcccatgcaaaacgggcattgccagttttacgtgtcaatccttctaccacttcatcgttcaaacccagattaaggattgtgtccatcatacccggcatggaagcgcgagcaccggaacgtaccgaaaccagtaagggattttctatatcaccgaacttagaagacatcaattcttccactcttgctatggcgctttctacttcgcctttcaacagagcaactactttttcctgccccatctcattatattcggtacaaacctcagtcgtgattgtaaaaccgggaggaaccggaaccccaataaggttcatctcggcaaggttggcgcctttaccccccaaaagatttttcatgtcagcctttccttctgcctgaccgttaccaaaggtataaactcttttcttgtccataatataaatttaagtttctcaattgtgatttttttctgttcgcaaatctaagtatatttcgcatactagaaaactttttgagaaaaaactttctatcaaaatgcaatttcgacattgcaatctttaatatttcacttcatagagagaattcccgaaaaaatgtctatttttgcagaataatttattagactggtgtaaaagtggcaagaaatagaaaagagcttcctctactggagaaagtgacaataacggatgtggctgccgaaggaaaagccatcgcaaaggttaatgatttggttattttcgtaccttatgtcgttcccggagatgtagtagacctgcaaattaagagaaaaaagcatcattatgctgaagctgtagcagtgaagttccacgaatattctcgtgaaagagctgtcccattttgccaacattatggcgtatgtggcggttgcaaatggcaagttcttccctattctgagcaaatcaagtacaagcaaaaacaagtaacggacaaccttacccgcatcggaaaaatcgaacttccggaaatttctccgatcctcggttccgagaaaacacaattctacagaaataaactggagtacactttttctaacaaacgttggttgacggaagaagaaataaaacagaatgtggtatacgaacagatgaatgccgtaggtttccatatccccaacgctttcgataaagtactggctatagagaagtgctggttgcaagatgacatatccaaccgtatccgcaatgccgtacgtgattatgcttacgaacacaattattctttcatcaacctccgcacacaggaaggcatgttgcgcaacatgatcatccgcacatctaccaccggagaattaatggttatcctcatagctaaaatagaagaagaggtagaagaattgagattattcaagcaactcctgcaatatgtagcagatacattccctgaaatcacctctctcctatacattattaataataaacgtaatgataccattaccgacctggatgtatacactttcaaggggaaagatcacatcttcgaagagatggaaggattacgcttcaaaataggtcctaaatcattctatcagacaaactccgaacaagcatacaatctttataagatagcacgcaacttcgccggactgaccggtaaagagttggtttacgacctttatacaggcacaggaaccattgccaactttgtttccaaacaagcccgccaggttattggtattgaatatgtacccgaagctatcgaagatgcaaaggtaaatgcagaaatcaacgggattaagaatacattattttttgccggtgatatgaaagacatgctgacccaggatttcatcaatcaatatgggcgcccggatgttatcattaccgatcctccgcgtgcaggaatgcatcaggatgtggtagatgttatcctgtttgccgaaccgaaacgtatcgtatatgtaagctgcaatcctgccacacaggcacgcgacctgcaactgctcgacgtaaaatataaagtaaaagccatacaaccggtagatatgttcccccacacccaccacgtagaaaacgtagtgcttctggaattaagaaatgaagactgaaaattttatcactaatcactaaccattaatcactatcaacgtggcaaaaggaaaaatagtagcgcgagcccgcacccaatatacggactacacagtaaacgaaccgatggaacttatggagtttctggcagccaagatgccggatgccagccgtaccaaactaaaatcattgctcagcaagcgagtggtattcgtagacagtgtgatcactactcaatataatttcccgttaaaaccgggtatgaaagtacaaatcagtcgtgataaaggcaagaaagaattccataacaacctgctgaagattgtatatgaggatgcatatatcatagtagtggaaaagatacaaggcctgctatcagtcagcagtgaacgtcagaaggaacgtacagcataccatattctaaatgaatatgttcagcgctctaatggacgcggtagcaacgtgtacatcgttcatcgcctcgatcgtgacacttccggactgatgatgtttgcaaaggatgaaaaaacgcaacgcacattgcgtgacaactggcatgagattgtaaccgaccgtcgctatgtagccgtagtcacaggagaaatggaaaagaatgcaggttgtgtcatatcctggcttacagatcgtacgctttatgtttattccagtccaacagatgacggagggcagaaagcaatcacacactatcgcacaattaagcgtgccaatggttattcccttgtagagttggatcttgagaccggtcgtaagaaccaaattcgtgtgcacatgcaggacttagggcatcctattattggtgatggccgctacggaatagaagacgtaaaccccattggacgcttggcgcttcatgccttcaagctttgtttctaccatccggttacgggagagttgatgaagtttgaaacgccttatccgaatgaattcaagaagttatttttgaagaaataaaaggatataagcaaaatagcccccgcagattgaagtgcgggggctatttattaataaatttaagttctcaataaccaactctacgcaaaactaatgcccgagcctcgtcatcataaccatccaaatagtcttcataaaaactataataccatcctgaaatagattttcgatctgcgtatgaacctgtaatacaagctttatcaccacgcccaaaatccaaaataatagttcccgaagatgctgtccaataacgttcatcttcaaaataccaatcgaatgtaccagaatcaccaccctctatacgaaagctacccgtccgattctcattaaataggaatgaagcatcacgattacctaccgttccagcccatgtaccaggcaaccaatattccgtttcatcctgatcatcacaagctgtaagcccaatgaaaaggactgaaagaaaaaatagcttataaattaagcgtttcataaggcattattattaaaaattagtacctaccatcatcacaatcattccattcaatttgccggataaatagttctcacgtacccatacattatcaaagtactttatttcaccggcaccatagttcaaaatcaaaccttccattgttttatctatccatttccacgtaaaagtacgtgaagttgtttcataagggcgactttctccactacgataatattcccaaatctcctgaccagaataatcagctttagcaaattttaattgatgactacataacacttcaacgccgtctttgttctctgttgtgtattcttctacccatttttttgcgcatagtttttcatcactgtttctcaaataatcgtcagtgtaatactcatcaccacatgatgacaaccccatgacaatcatcagtaaaaaaagtatttttccaacattcaaagttttcataattcgtttcgtttagttaatacttgcggacaaaaatacgaaaagatattgaaatgttttaatatttcgcctgatatttcttgtagaaggtcagaaacaggataaaacctaccatagcgaaaggcactccagccagtgccggataacggtatccaccactaatggctaatcctcccacataggctccaatagcatttccgagattgaatgctacctgtacacaggctgctcccagcatctctcccccttttgccacacggattatcagcacctgttccggactggaaaccgcaaacagaccggccgtacacagacacatcaacaatgcagataaccacggataaggagacaggaagaatatcaacagcaatacaatacagatcatagcctgcacagtagtccccactttcccgggagtataacggtcggaaagccgtccgctaaccagattacctaccaccatgccaaagcccgccaataccatcagcgcggtaatgctttccgcagtaaatccggacacctccgtcagcaacggattgatataactataccagcaaaaaacacctccgtttcctaaagccgttgcacccaaaatcagccagggagccggtgttttcaggaatcggaattgccccttaaatccagtatctttcaatccttccacatgaggcacccaacgccagatataataaagtataatcacaccccagcaacctaccaataagaaagtgacacgccaggaaatggaattactcaaagaagtacccagtggaactccgaacagattggctatggtcatccccgctatcattattgatacagcctcggaaccctttcctttatcagccaacttttccgccacaatagaggccactccgaaatatgcaccatgaggaagtccggagataaagcgtgccagcaataacacccagtagttaggtgccagtgccgcacaggtatttcctaccatcatcaaagtaaccaatgccaataagatatgttttaatggatgcttacgggctaagatcaatacaggtgcacctacacaaactcccaaagcgtatgcggaaataaaatgtcccgcaacaggaatactgatacctaaatctttagctacatcgggcaagatgcccatcatgacaaattcggcaatccctaatcccaaggtgccgaatgctaatgcgataagactcttcttcatacctattttacctacaaaaaaccaatcttttaccggggcgcaaaggtagtgttttttttatttcaatgataaactatttaagtctccattttgtttttatagataaacagaatataaagatgaaaacaattattataagtatttttatggcaatgatggcaatagctgctcaggcacagcaaaagagtttctacgactttacagtcaagaccattgatggagaagatatatcactttccacctttaagggcaaaaaagtactggtagttaatgtcgcttccaaatgtggatttactccgcaatacgctaagctcgaagagttatatgagaagtatggaaaggataattttgtaataatcggctttcctgctaataatttcctgagtcaggagccgggcagtaatgaagaaatcaaagaattttgtacattgaattatggagtaacctttcctatgatggctaaaatctctgtaaagggaaaagacatagctcctttgtataaatggttaacccagaagagcgagaacggtgtgcaagacgcaaaagtcggttggaatttccataaattcctgattgatgaaaacgggaaatgggtagcttcttatggttcatccactaatccgttatcagaggaaatagtgaaatggattgaagagtaactttcctgtttacccccaaaagatagccggcaacacaaatcaaatgcgctgccggcttgttttatataaaccttatacttaaagcgtcattgcctgtccaccaattgcgcctacaatagcactggctatggcaattatcatcttcaaaattacattccaacccgttttcttcatagtgaccttttttactttaattattagttttcattaaccaagaggattttcatccaatcctccgtcgcccgagctatctcccgaaccgctgtccgaaccacctcccgcaggaatattcgacaaccctttcagataatcgtccaagctgaccagatccaacttttcacctgcacgggtagcagtcttggttatcttcaactctttattggcttgaaagcagatacggacactatccacactcttggccgtaacatcctccgccttgtccgcccctttcgacttggcagccagcataaatacgcccaatccgccaatattcaccgtcttaccttccagcaactgctctttcagcttctccacaaagttctgcaccacacttctgatatcaccgatagaaagcgatgaacggtcctgcatcttctgggcaacaaatgccaagtctacactttgacccaatgttactaactgcgggaaatacttcttgggagaattctcaacccgagggtcggacggtctctctaccgttctaaaaattacactcatactttttcatttagagatttaaattccgtttttaattcactcatttcgttgatcaacgatgcaaaggtgaggattaaatctctaataaaagaaggaaaaaaggcagcgagagcagtttttctgagaaaagttgtaagtagctataaatcaaaccttgataaaaaaaggttcaaaggcatctcaccggagaaatagaaataaacccttcccgcatgaaaatagtctataaaatatactgactggaaacgtgattattagtaatatacttaataaaataagtaccctctactattgaaaagaaaatgtaccaagtagtatttgcatttctttgataagtaatatattgcatatccttaccatatcgttcaaaaaagacgggagcctttttctttaatttagaatttatgttttgttgaatatcagaaattaagtcctctacgtaagaaatggcaaaaggataagtccctaggtattctttttcaataagcacttctataagttcatataaatcctcttcaacttcaggtgcaaatacaactttcattcgaacaaagcttttatacgagggcgaagcctatccaataattcttcaccggaaatagccaattttatattgtcccgttcactcgtgacagtgccagaatctatctttgaataaacagccatagactcacttactttctgcagtatcggttcttgctctttatatactttagacttacccatatctcaatatattttctacaaaggtaatttacaatattgaattatcctaataatcattcaataacttgtactttcagattcagaacctatactacagtaaaaacttctatgagttctacgcagagaaagtacacttttcatccaataatgtaattgtcccccaagttgagagacaattacaagtagctgataactatagaattatcttcgacataccttgggaacatcaaaaggtgataattagcaaagcccaaaacatagaagaagcatttcaactattgtaagagcttttaaggctatgggtgtaaaaacgtatgatattctgttggcaatagcactggaatatctgaatacttataatctttaatatttcgtgttattatacgggggcgtaaagtaaactgtgtcatgcgctgtttttctttcaagctcatcggtcggggatcggccagcgccaagggggtgcaccagcactcccgacgagcgtaaaattacaacaacttaaatctatctccaaactttatcgccagttgttgggcaattgtgccccaattagccagtggcatagtccatttcttgcgtatgttgcgataagcgaggtagacaagcttctcaagggcggtgtcattagggaacacgcccttgttttttgtaactttccgtatttgccggtggtagccttcaacggtattcgtcgtataaatcatacgacgtatatcggatgtgaactggaagtattcagtgagcttttcccagttgtcctgccacgacttgatgacgataggatatttctctccccatttctgatctaaatcaagaagctccgtttcagcggcatccttgctgactgcaccgtaaacccgtttcagatctttaagaaactccttctggtgtttactgccgacatatttgatggagttacgtatctgatggacgatacaaagttgcactatggtatcagggaatacgctttggatggcatccgggaagcccttcagaccatcgacacaagctatgagaatgtcgtgtacaccacggttctgtaaatcggtcagcacattcaaccagaagtttgccccctcattcttagagatgtacatcccaagcaaatccttacgaccgtccttatctatagccaatacgttgtagattgcacgggtaatggcacagcctctctcatccatgactttataatgaatggcatccatccaaactatcggataaatatagtccaggctacgcgaacgccacgcttttatttccggaagtacccggtcagtgatggaactgattgtttcggcagacacacggttaccaagattctcttccatccagtcgcttatttcacgtgtactattaccaagggcataaaggccgattatgcggtcagcaacaccttccgcaagaatggtctcccgcttctttataaactgaggatcgaagctggaattacgatcacggggtgtagaaacggtcacctcacccatagaagtttgcacctgcttctgcatcttgccattacgacggttgccactcatgcgttcatcctcggaaagatgggcatccatctcaccttctaaggctgcatttaaaatgctctccaataacggggcaaaagctccgtccttacccaacaagggcttgccagccttgagctgctcgattgccttgttcttgatcctttcaaaatcaaattcttcactcataaaaaaactgtgttagcaaagttaatactttttttgtttgctttgctgacacagtttaaattacagcctctattataccttcaactgaagcatcttgtaacgcagtataatgctgtatagcatcttcataatcagaaaattcagaatacacaacattagtatctacaaaatagcgcttcatcagattctttcttccatctcctttttatagtcaaaatccttaggtaactttacaactccacgtagtttagaagaaaccggagttgtttttctctttgattgaatctgcaccaatttgcgcaactgtccctctaatatttcagatacagttcttcctctactttttgcgtattggttaagactttccaataagttattgtctaactctattgttaaattcgttgtcatatctcgttctcctttctaccacaaagataccaattaattcaatccacaagacttcactactacttttcaatcttgtgccgagtatccttgtaccatctttcaaataggttgtaagggactttgtttgcggtgcagaatttctgaatagagattcctacggggacgacttcggccttgtaacgaacaaagagacgttcaaaatcattgtagctgtacatgaattctaattttcaattatacagatacaaaaataggggattacctcatcgcgtgcaagacgtcataattggatgctaacggattatgtaaatatagaaaatattacctcttagaacccctcaaatacccttcatttagtatctctacttcattttctcctataataataactccccacttttttttatattctattttttgatcctggttcataacaaatgcgtcaaaaggagctatactacttatgtgtgaaaacaaactattcatcttcctcacaataattaagcatattattaaaatcgctcataattccttgcataattctattaaaatagttggctcgaatcagcccatctttgtcttgaatcgtaccattcacactgtgaatatccgctcgcatcattccattttcaatttcccatacagcaacttctttagaatccaatacgacttctttacagtcaagctcctgatactcctctttcggcattttattcttcacagcataagccattaaacaattattcaatgcatatagaatataaggactatgagtagtaataactaaacgatgatttcttccatgattaatagcggtaagtaagtaaaataaaagatcacgttgcgcttctggaaataagttttgttcaggctcttcaattatgaactgcgtatgagtatacacctttccttttataaaacctgccagacgtcttttcaattcttccaattcatccgaagttcggttattaccagtctgcaatccttctaacaattgggtaatcttctcactttcagcataagagtaaggtttttcctcttcatatatcccttttgagagccaatctattagtagtaacaaagggacaattgactgtaacccgctagacgcagtacgcaaagttaatttcttaccattttccatttgcaacacgtctgtatcaccatctcctgaataatattttattcccatattcaagaccttcatcttgtggtcaaccggatatttgcgtttagcatcataccaattttttataaaatccaaaagattatcattatcttctgcataattgcgcaaattaggaactacagaaacaaaattacgttccgcaggaatataaataactttaggatttattttcttatcaagagatagaaagaaatactctttctcaatataatgttccgtataatattcatcatataacaccgggatttcttctttttctttccaattataaacatatgtcaaattttcaccggcataatatatcaacgagtcttcattaaaataagaaccggacaatttgtgatacgaccgcaaacgcttataagcatctttccatgccattttctcttcaaatgcatttgtcttttccatccaagtacagaaacttataatcttcgccaatgtacttttaccacaactttgtggtcccatgaatacatttactttttttaagctctatatccacactcttgataggccctatattttttacaatcaaccgactcatactatcacattcatatttatctcttgcaaagaaacaaattccactccaaatatcctaaaatccatctttctattttaaaaagaaaaccccgaaactttcagttattgaagtttcggggttcaaagtgcttttgaaaaaaagtcatctcttatagcacttttttatttgctctacaatataagccacatcttcatccgtcacccaaggaccggcaggaatacataaacccatattaaacaaacgttcagaaacaccattcacataacaaggattagttgcatagacaggctgcaaatgcataggtttccacaagggacgggtctcaattccctgttcatccagtttacgccggacctcatcataattagtaccggtcttcactggatctatcagaatagtagacagccaataattagcattgaaacgaccatcaggattagatttcaacgttataccatccacaccttcaaaagcattctcataaagagcatgtacatggcggtgatgcgcaatatgctcatccaatacggtcatctgaccacgaccgatacccgcacaaatattgctcatacgataattgtaaccgatcttttcatgctggtaatgagggaaaggttcacgagcctgcgtagcataaaacatggtctgcttcttggcgctttcatcaggaacgatcaaagccccgccacccgaagtagtgatcatcttattaccattaaaagacaacacgccaaaggtaccgaaagtaccgcacttctgccccttaaactcagaacctaaagcttccgcagcatcctccagcacagggatttcatatttagcggctatcgcgcaaatctcatcaatcttggcaggcataccgtaaagatgaacaggaagaatagctttcggcttcttacctgttttcaagattctgtccttaatggcttcttccagcaaaacagggtccatattccaagtatcctcctcactgtcgacaaacacaggtttagctccctggtaagctacaggattggccgacgcacagaacgtaaacgactggcagataacctcatcaccggctcctacaccaagttggattaatcccagatggatagctgccgtacccgcagataaagctacaacttccttatcctgtcctacaaaatgtttcaattcatcttcgaaagcattcacgttggggcccaaaggaacaacccagttagtatcaaaagcttcctttataaaagcctgctccttgccgctcatgtgagcaaggcaaagataaattctcttgtccataaaattatgtgattataaaactataaatcgagaagtaaaaagagtaagaaaagaaggattatttacgccataaataacaaggtataaacaaccattttatgatattacaaatctttcccaagtattgtataaataatgattttaatatcattccagaaagaccaattatccaaatattctatattaatccttactttgtcagggaaaagcacctcatcattgtatttttgaggattttcctgctgtgttaataattcttcttcattccggtatttcaaactggccgggccagtaataccgggtttcaaaagaagcattcttctattgtccccttcaagtttatcagcatatcccgggacatccggccgaggaccaacaaaactcatatcccctatcaacacattccataattctggcaactcatccaatttatatttccgcagttttgcccccaaaggagtaatacgactctctccctgtacagataccgaacttccggaatgattcatcgtcatggaacggaacttatacatgataaataaccgtccgtgctgccctacccgtttctgcttaaaaatgataggaccacttggcattttaatacgaattagaaaggcaactataaataaaattggacagagaaaaaaaagaccgaagaatgaaaataacctgtcgaaaattaatttaatcaacatatactacatccgtttaattacagcattaaagacataaccacaaaaacaaaaagccgaaaaaaggacagagagatgttctatttttctatatactctccaaacatcttttgctgctttccatttcttagccgtatttgaggttgaaaccagacgataacccgccaatacttcctttataccataagccttatatcccctcttcattatcaaaagccaaagcgccatatcatgactactcttaataagaggcatgcgaaaatcacctacgatattgcgatcaataacgactgttaaacatccaataattgtattccgcaaatattgacgataagataaagagcttggtatacgtataaaactacccgtttttttcccatcctcttccatcacataatattcagaataagtaaatgcatacttattctccttcataaaagcaagttgcctttctagtttctcaggctcccacacatcatcactatctaaaaatgctatatattgtccgttagcatgttctattgcgacattccgggcagcagcagcccccacatttttcagaagtgaaaatagtttaatacgctgatctttatcaattattttttttataacttcaactgaagaatctttcgaacaatcatcagctataagtaattcccaattttgataagtctgcacaatcaccgacttaatactctcagtaatgaaacgtgacgcattataagatggcatgataatggaaacaagcccataatcttttaactcattcatagctattcaccaatcgtagtatatctaaatccttcagcttccagttcatcccgatgatatatattacgaccatccacaataatattaccaatcattattttcttaatcacattccatgaaggtaagcggaactgacgccactccgtcatcaaaagcatggcataagcaccatctacacagtcataaatattatcagcatacgtaaccgtatcaccaatacgacgcttgcattctgccatagcaataggatcgaatacacgcactttagcgcctgttttcagtaagcaatcaattattaccagagccggtgcttcacgcatatcatcagtttcgggcttaaatgctaaaccaagtacagcaattgtcttatcctgcagagattccccttctggcatcattttctggagtttcttgaaaacaacccccttttggtattcatttacctcttccacagcttcaattaccctcatgcgataccccatatccataccagtatgtaccagcgcctttacatccttaggaaaacacgaaccaccataaccacaaccagcataaaggaatttagcaccaattctagtatctgtccctatgcctcttcgcacattatgaacatttgcaccgactaactcgcataagttggcgatatcattcataaatgaaatgcgagtagccaacattgcattagctgcgtatttcgtcatctccgcactaagaatatccatgaaaataactctaaaattttgcagtaaaaatggttgataaagcttcgtcattacctcctctgcacgactactttcaatacctacgactacacgatctggactcataaaatccttaatagcagcgccctccttcaaaaattccggattagatgctacatcaaatggaacatccaccccacgtttatccaactcttcttgaataactgctttcaccttcttggccgtaccaacagggacggtcgatttagtaactagaatagtatacttattgacattctgaccaaactgacgggccacagccagcacatactttaagtctgcagatccatcctcatcaggaggtgtgcctactgcgctgaataccacctctacatcatcgagcacagaagtcaaatcagtagtaaaatgcaatcgaccataccctacattacgtttcactaactcctccagcccaggttcataaataggcatctctccctcatggagtttatcaatcttcttttgatctacatcaacacaagttacattagcacccatttctgcaaaacaggtacctgacaccaaaccaacgtagccggtgccaacaattgctatattcataatgatttaaattgaattatttttttagatttttcaaattctgatacccactaaatgccaagctgattaatccataaagtataaataaaaaatcaggtatatcctaatggcaaaaacttataataatcacaagaatgataaagtaagtattcaagcagcctctagcacaaaagatcaacatataaaagaagtaagaaatatccaccgactagttagcgtccaattttgacgtgtatcccaaggaaagccgccacaaggcggtttcctaataaataacgtcaaaaaagatactgatttttaatgtttgttattgatccagtccgattgtcaagggtaacaaatgttcataatccctacgtcctttaacaatctcgctgaaaaatctcttgaaataatccagcactgacacaccctgcatcttgcatgtcgagatgatggtatgatataccgccgagacgcgggccatcctgtcactgccgaagaataaagagttcttccgctcacccgccaagggacggataaaacgttcggcaatggaattgtcgattgaataagagccgtcattcaagtaggcgaacagctgggtccagaaagtattcatataacttatgaccttctccatcaactctccgcggggcggatgaccgtcactgagcaggacgtcaagcttactgcgtaactttatgattatttccttggtctttaaattattccggcaaagctttatctgttcaggggacaacccgccttcctcatactcacgctccagtttgtaaagctcacctatcagttccaatatgaatgcggcatccttatcatcaccctgctcaaacgcatacttgaacttcgcacgggcatggaccatgcaacaaagatgttctatatcgaccatatggtcatccaaatacatatagacattgtagccgtccgactgaagcgctttcacctggctgtctcccagaatatgcttcagggcatcccgtcccctggaaccgtcctcgtagcaatagattaccactctggacagtctgttgaccaagcaccagatgtattttttcttgcagcatccctcacgccttacccggcaccaggtctcatcacggtttacaatggagtccttctccagacaactatttttaagataaccaatcaaaccgcagaaatgagcggagcctttctccagccagttggtcaggctcatacggctcaaatgcatcgattcacccgacaatctgtacatttcacgataaagagggggatcaagaacatatttgttgaaagcaagataagcaaggaaagaacccgaagcgtgcgttcccggaacaacgtcaatgatttcaggctgacccatgaaagggaaatagccttcgtgaattttcccgtccaaagttttatagcggataacctcgtaatcatgctccacaagactgcttatctgctcataggcatatttacggaaacgtttgatgatgatggcacctgcgggcagatggcggatatcactgtcatgacaaaccgtattgtcggcactcatggtacggtaagaaagtccttgacgataaagacgggactcttttgattttgcagccacgtcctcttcccgcacaggagcctcaccatgctgcggcaaggaggagcaaagggattggggagtacagtcgaaatcatccttgtcacgggtagcgtcctcttcgatctcctgcttctttttatggatacccttttggctcttaccaccataaaggttcttgttgcggacttttagctgctcttccaatgctgttattttagacaacaaattaccgaccagttgtttataatcgtcacgctctttttctgcggtcatggcagccttctgcaaagacaacagttcatcaaccttggacaacagttcatctatccagacctcgtcacgtcagatgcgttcagcgtcacgctcacgggcagccatcagcgctattatcattttggatttttcctcaggggtcatatctgaatatgggtctgcaaaaggtacaggagtctcctcacgttccttcagcttccttgcggaagaaagttgtttcattctttccaactcattcatattcagtatctttggtacttcaaagatacaaaaaaacaatgaaataaaagaatatttttgctacttttcacttgttaattatctgattctcaactttttaacaacaggagattccaacaagagaatgacatcctgccaatggattgaataaatactttcatcactatcatagctgacatgcataaacttgtatccgggtctgaaacgtttctcaaacatgctgtaagaacgtcggtaaacgcaccagacgtaaatctttagacatcacgataaagacatcaccatcctccggctcacgattcaactgttgatggatgatggataggaccttatcatatttacagcgcatatcatggaaatcacggataaagaaaaagcggttgagccctgttatattcaacataagccctccagtttctctactaagcttttcaaaccttcgtagcttaaatttttctgactgagatgaacaccattgctcatgtggatatcaaccagaattcgaagttcggcatgcgaagaaaaactagtatccgcttccggcttttgttccgggattgaggaagcaatttccttcattccggcttccggtgaaggagcgcccaaaaactgaacaggaattatcttctttcgggtatccttgtaccatttctcaaaaaggttataaggtactttgttggacagacagaatttctcaagcgaaacacccgcagggaggccttccaatttatagcgcaaaaatagacgttcaaaatcattgtaactatacataaactttactgttgatttaacgatagcaaagatctggcttttattgcgtttatcctacacggcatttttggacgctaaccgataattagtccttaaagtgttacataactaaatatactaagaattcatttctcgtcatctttttagttctaaattgaagtattttttagaaactaattatttatgctttctatgagatagcctaaagattcttttcgaagttcttctatacggctatttacaatattccagtctataggagacttggcatcatgaactgtcatgccatcacttaaaattctattttcaagtccaaacctttttagcaaagtgagcagtcgttcatccttgccactatcacctataagtgtaacaacaaaaggtctattaaatattattgacatggctgtacaatgaaaagacgctgtaaaaacgagttctgcgctattaataacactaagaaaatccgttggtgacatactatactttaccttaaccttcgaagatatgaaatcacctatacctgttgctcttgccaatttataatgcttcatccctttcatgtcataacctatttgatttataaatgcttcaaactgattatctttattggtatagctaaacacaaatggctctttaatcggctctgtcattttcagccaggattcttttgttaaaaggaaaaccggatccataactagtttagcatctctgccagtcaactgtttgatgagtttaactccgaatatttcacgagtgcttatatgcttgatttctgacagatatttcttataacagtcaagatattcatcaggtatctcactcataccaaaactagaagagtaagatatttttttttcattatcatcaacaaaatcaagtaggaatgcagtatcataaccattgcacacacaattccacacctgatcacttccaactataaacttatcaaatagactattcgcttccttcgcttcgtcagaagacttatacattttatgcgtcttcttcagattagccttatagaatttatcaaatctatattttcttaattccataaagggcgttcctaatgtataagctaatgcagacaaccatttcttatgattcaggctatctacaatatgaaacatcatatcatattcgtgttttctagacatattttgataatctaagtaaagattatcgaaaccatgttcagttaaagctctttgcaaagcatatgactgaagagctgcaccataattagctgcagtatggaatgaaagcaatgctattctcattaatatattttaattatagaatttaatctctggtatgcacttaaagccaaaaaacgaatgtattttttttgccttattgactaaatgaagtatatcattagctgtggcattatctatatttgatatccaattagaagtcttctttgaaaacatagcactaccatatttcataccccttattaaacgaataataatagggttgtagctaataaatacagaaccacagctcggcttatcggccgacaaatacttcttggaataatccaacctttcctttatcagcctttctgtttctttagcgctctgttctctgaatttgaaagaggctttcaggataattgcatacatttcttggaatggtgaatgccgatagctatatccttctgttcctttaagagtttttattttgagctcatcaatatccaaatattccacttctagtatatagtccgaaatagaagcgcctattgattttcctctgccagcattcatatatattgcccctccgacgcttgaaggaacggaataaaggtattctattccgccaataccaaaattttcattagacttgataagcttttgaattctgacagaacaaccaaccttaacttgattttcaccaagagaataatctattgttgaatctagctccataaggttaattattggagttacaacatgctctgcaaagataatattgctgcctgcagaaagaatatggaattgctttcccaactttttaagagacttcaatatttcaatcaaatcagcaacatcatgtggaacatacattgttttgcagttagaatgaagcctcattgtgttgtacttgtacaagtcaacattatgtaaaatagtagcagccataactaatttgaaattcgttcaaataaaacagacgcatcagaaacggcttccttctgaggaatcgcgttcaatgcagatacatagctatcataaataacttgagatattccttttatcttgctgattatttcatcatctttcaaagcattgacatcaaagcctacttttaacttattaaccttgtttgcaagataactgttatagctgacaattattggcgttctaaagaaaatggcctcataaattttatttggctctgcatactggggattaagggttgttgtgtcgtacgtagcaacaataaaatcaatcttgctataaatcttcggtaaatcaatcgggttcttaaatgcaccatgaaagaaaatattgttgatgtccttcaaggattccgcctctatttccatgttaggataggtagtgccgtaaaaatggaactcaaagttagggaagtttaaagttataactttagccatattaatgagagtatgatatcgtacgttgcctacaaaagcaaatcgaagatgcttgatatcggttttttctttttcaacctttggtaaggtgaacaacctctcgtcaactttatttagtatgagcacgatattctttggaacattatcgccatagtaatagtccgcaaaaccttgtgaagtaaaaaccgtgacataggagttcctaataatcttaagattcaaattcttaaataatgatttacctatacctgccttaagcctgtcaaataacatgtcagactcctcataaacgtatttaataccattagtaaaaagaacagcaacagcggtgttgagagtaaagaaataaaacaaggtcgtttgtttatcaaatttccttacctccctcttaatatctatagaataatggtagagccgcttaaagtatgacatcctacgcgggtaattccccagtcgtatgattgaataattttgcggctgagacttctctacaaagctatagacaattactttgtatcctttttctataaattgagtgattctcttatcatttctagagggaaagttatatgtgaagaaaaccactgtagaaatattcttcatatcctaaaatttcaattttgtttttttaccttacttaaatctatcatttctcccattctgtcatacacttcttctttcaagaaaccatacccttgagtaaatgtcaactctccaataacaggacggccatttactacatagaaatctgttcttacttgagggaactgctttgaaattttacgggctatatccatcatctcatccaagcacacaggtttattcactaccatatcattcttatcatatacataatgcgacatagaatttcttgcatattcgggtttcggattccaattagtatcgaaacattgaacgtgtacatgcatattaactctattatatgccacccagataaattgaggttccccattaatacaatataccttaaaatcaaccagtgatttaggcgaaagttcaagataatcattatgtaatagttcttcagccaatatacaaggttttattcttgtataatgaatttgcgcatgcatccaaccatatgggagaatcaaccatctttttagttcttttcgcaaggctctaagattaatcttagacttatctggaacaacttttactgttgcacaaccattatttgcttttattacgaaactgtctggtaactgattaaaatcaatctcgttgactttatcccaatgcccatataatttaggcatataatctaataatccgagattggagatatactcacgaactctgtatttatcagcacaaagagtccacatggatgtatcagaatgtaactccatccagtatattttctcaatcaaattatgtggttttttcaagttaacatgtttgttgaagtgaggataataacatctatcaacctctttctctggattaattgcaacttgcaacttaagataattttctcttaaaaattgatacaaaaacgtttttttaatattcataattataatcaattgtgggtttattgttctttattattttcccaaggtgtaacatacattgttactaacagtaagaaaaggccatgtgtcaaaagtgaagttgtaaatgaacttcccatcaaagtatagataacaataatagcgacgaacatcactatttgacgatttgactttccgaatgccgcctcgcaatatttaaaaaaaatcacatatagcaacgggtatattatacatcctataaatccaatatttatataaaaatctgaaaagaaaccattattagccctaatctcgccattagaccaatattgtgccccaatagcaaatgaaacatcttcaccatgatatccaccataatataaagggccattatttagagtgaaatcataataaaagctatcaagcacctgaggtatcatcaatactcggcgcactatcacagttgacaacacatttgtacccaaggcaatccattcaagcaatgataaaacagcaagactgagaaaggcgattccaagatattttttgaaatcaactttataaagcaagaagagaaaaatacagataatcatcttaaacaaagtggatttcatcccgtttgttgaaaaacttaaaaagatgacaaataccaataatatagaaaaagcatatttttttctgctgagagcatacgccaatgcaaccggaagaatattagaagatgcacctctaagatatttcaatattgtaggcatgtcatagtctctagcctcaaagcgtatttcatatacatcaataaagttgaaactcagcctgaaattagcataataggcagaaatgaaaaaaacggtaacaatcaatacagctactatgagattagtcagcgtggtactcttaaatttatttgaaagtttaggaacatgaatagttttcaagaacagatatatcaaaaaaagatacaatacctcacacagaataaaatctataggctgttgtttacaagctataaaagacgtgaaaggcacaatctttagaaaaaaaataatcaatgcaatatctgacgaaaactcttcatcgctcttcaaatagggaaaaactataacgataaaagcagccagaattatccatgataggattttacaaaggtgacttgggtcattaataaagccataatacccccagaaaggtgcaatagtttgcacatacagaatatctagtagcattctgtatattaaaataaaaattacgaaaactatcttactatgagaacgggcaacgtccatacttctacaacaccaaaaaacaatctctaatgataattaattctcaaatacctgtgctacaaactatcatttaagcagcttcttaatagaagtcgtataatcaatcttcaacatcaatcctgtgggtaaaagaatagcataaaaaagtatggcagctattgctattatcacaaatggagagctcaaatagacgaccttgtgcaacaataaaaatattggcactagacaaaccgagcagtgcagtaaaatcttagagataaagacaagaatttgtttgtttatcaaactgaatcctgattttctcttgatatgtacaaaagatgtaaagcggataagatattgagaagtagatgcaacaagcataatgacatacgccggtgctccgaacctgacaaacatataatcaagagcccaaacatagactgccgcaataaaatgcgtctgcatataaaacttactttcacctattgccagcaatacagccagatatggaaacacatcaataaagtccttcaacatatagaatcggagatatgttccagatacagcatatttttctccgtatattaagaccatcaactctacggcaaaaaacatactaaacaccaatatagggaaaacaatttttacagactcgtataatgcgttattgtaagtagtcactgctttttccatagaacgctctgcatccgcttttgaaaacagaggaagaagaacactttttacagaagaagctatcatggcaacaataggaatacttagacatccattagaatactcggcaaaagcctcggttccgtaatacctactaacaaaaaattgatcggcagcatgaatgcagaagccaaatgcacatgctcccataatagggagcgagtaatcaaaaatggcattatacatattagacaccaattcctgttttatcttcgtatatggcttatttttcatgtacattgcaatcaagaatgtaatgaaagatgctgccccccagcccaatatggcccctctgtatgttgtatgaaaaacaatgacaggtataactatgcaagccaacatcatagccttggaagcaatattatatacagcaatactctttgtcttctttaatgcagtatatatgccttcaacccccattgctggaatagtgaacagcgggaaaggcgagaatatctttatgccgacagctaattctgggttgttcaaccaaattgaaattggtttggccaagaaaaacagacttaaagagaatactacacccaacaacaagaaaatacgagtcaacccattaaccaatgacttttgctcattggcattcattcttgggatgaaataagcaaatgcacttggtaaccccatagtaaacaaactctgcatagtcgtatatatatacagtatctgtttataagttccgtactcttgtttgtcaaaataacgcgcaaggatagcagcgcttaaaaaagaaagaacaaaagtacataactgccctattccaagccacagagcctgattgaaattactcgtattttctcttgacatattgattgattaccttcccttctaattaaatatgataaatcttcgccccactcttctccgcactaatcacattgcagcagtcgagcacaatcttacccttcagtttctcctgattctcgatgatatggctatgctttaccataatcaccaccatgtccacctcattcaggaactgatcgaaatccagaatctgattcttcacaatttccatgttagtgaagaaaggatcgaaactcttaagaggacgtgccaagtggcgagtctgaatgtcgtgcatctgaagagtaggactctcacgaatatcatcaacattttccttataagtgataccatacaggcctgctttgcggttgtcagtaataccattctcatccataatctcgtaaattctctcaagtacaaaagttggctgagaatcattggtcttcatactctcgtcaatcacctttgcgagttgaggatagtcacccacgaggaaccaaggatccacagagatacagtgaccgcctacgccaggaccaggctgaagaatgttaacacggggatgcatgttacaaattttaacaatttcatacacatccatgttgtcgtgacggcagatacgagccagttcattagcaaaagctatgtttactgcacggaaagtgttctccaccacctttgtcatctcagcggtgcggatgtctgtaaccacaatctcgccccgacagaaagaagcataacacttcttcactgcctcacctatctcacgtttgtcggcaccgatagtacggttattatacagcagttcataaaccatgttgccaggaataatacgctcaggagcatgaacgaggttgatgtcctcaccaatcttgaaaccggtagctttgatagcaggacgcacaaacttgtcgatagtgccaggggaaacagtgctttcgatgactacagtagctcccttggggcaaaccttcattacttccttgactgcagcaactacatagcaagcatcaaccttttttgagaatttgtcatagggagttggtacagaaacgatgtacatatctgttttctgatactctgtagtaaacttaattccagccttcacagcatccttgaaaaggtcatcaagaccatcttccttgaaagtagtatgaccagcattcagagtgtcaacaagttttctgttatagtctgtacctactacttctacgccatgagacgccatcataagggcggtaggaagaccaatgtaacctaaaccaattacgttaatcataacattatattttattaattattttacttcgtatctatcagtctctttgccaataagaatatcagcgattctacggcacgcctgaccatcaccataaggattgacagctttcgacatacgttcgtaagcagctgcatcatccaacaatatgctcacttcgctcacaatcttattgtagtctgtaccaacgaggtgaacagttcctgaagaaagtgcttctggacgttctgtagaatcacgcattacaagtactggtttgcctaatcctggggcttcctcttggattccaccagaatctgtaagtacaatggtagctttactcatcaaatgcacaaattcaagatattgcagtggctcgataaagaagaaatttggacgtgttaaatcttcgccaaatacttcgtgaataggtttgcgtacattgggattaaggtgcatagggtatacaaagtccacatcgatatatttctccgacaagtccttcatagccgtaaccatatgaataaagccatcgccaaagttctcacgacgatgaccggtaatcagtaccaatttgcgaccatttgccaaacgagtgatatcatagcccgcttcgtgtaatacatggttctgctcttctgccaatacagcatcggtagaaagtttttctactaccatgtgcaatgcgtcaatcacagtattgcctgtcacataggtattgccgtgtgctttctcttcaaacaagttcttctccgaaagaggtgttggtgagaaattgtaggtagcaatacgtcctgtcaactgacgattcatttcttcaggccatggactataaatattgcgtgtacgaagtcctgcttccacatgccctacaggaatctgtgcatagaatgcagctaaggcaccagctgttgatgtggtagtatcaccatgcacaagcacaacatcagggcgacattctttgaatacgtcacgaagtcctgtaagtacacgggctgtgacatcagtaagatcctgaccttgcttcataatattaaggtcaaaatcgggctttacatcaaagatagttaacacttggtcaagcatttctctatgctggcctgtaacacaaacaatagtttcaaactcattgtttcgcttttgaagttccttcacaagcggacacatcttgatggcctctggacgagtaccaaacacgagcattattttcttcatatatataaaaacttatagaagctttaatacaaaatatattaatcacgtctaaatatatcgcgtgtataaactttctcctctacgttgctcagacagtcatcaaagcgattggcgataatggcgtggcttaaatctttgaattttgtcaaatcattcaccactttgctgccaaagaacaaatcaccatcattcaacgtaggctcatagataatcacatttgcacctttggctttgatgcgtttcatgataccttgaattgcactctgacggaaattgtccgagttagacttcatggttaaacggtatacacctattgtcacttgctcttttgaaccattgaactgattgttggttgagtaatcataccaaccagctttacgcaatacagcatccgcaatgtaatccttgcgagtacggttactctctacaatggcggtcatcatattctgtggcacatcggcatattttgccaacaattacttggtatcttttggcaagcagtagccaccatagccaaatgaaggattattataatgtgtaccaatacgtgggtcgagacctacaccattgataatagctgcagcatcaaggcctttgatttcggcataagtatcgagttcgttgaaatatgatacacgcagtgccaaatatgtattggcgaagagttttactgcttcggcttctttcaagcccatgaagagagtatcgatattttctttgatagcgccttcttgcagaagttttgcaaaggtgtgagcagcttcctccatgtgattacctgcaatctggatgatagcatcgttctcttccttaaactcaggttgacgaatcatcttgggataacctacgatgatacgacttggataaagattatcatagagtgctttgctctcgcgcaaaaactgaggaggggaagttaatactcaatttagggcacatcctttttataaggcaccagaatgggtcctcacaaaaaattgccattaaattcgattggtttttaactattggcatacggccaagtctatattttgcggtgccagactcaaaaaatctctgcaaccgttaaaaattccggtaaaaaatttgccaagataatcccacgtggacctgccttgcagcttcaccgtgctgattatgctatgatatacggcagcaatctctgcaccctcgtcgctgccgaagtgcagggagttctttcgttgggtggtaaagggacgcaccgcccgttccgccagattgttcgagatcggataacggccgtcctttatataagtgaagacttccttccaaaacttgtgaagataattcagggcctcccgcatataacaacttttctgctcctcctcgcttttcaactcccgcaaaaggtttgcccgcagatttatcatagcctccatggtcggcaacccctgccgtcgtcgggtacgttccacgccggtgagcatctccctgtcatactccctttcaaaacggaagagcaggtttatattttcaaggaatacatcagccctcttgtcgccaccctccatccgggccttcacgaacttcgccctcacgtgcaccagacagacctgatggtcagtatccttatacctgtccgttttcagctcgtcaccgataaatacataggcattataaccgtccgacatgagagccttcagctcggcatcaccaaaaaagttcgtcagcacgtcacgaccacgggaaccgtcctcgtaaaggaactgatcggcagggtaaaaaacggatgacaaggcgttcgcacttaatgcgcgtaggttactcttccacttcttcccaaggatagggattatcaatcacattctggaactcttcaatggcttcttgttgttcagaagtgagtgatgcggaatcccaagaagtgatgattacacgaccttcgtctgctaaaggctcatcaaacacctcaccatagcaggcggtaagcaggcgaagtttcagcaacgaagcgggaagagcatcaagaatatcccaacaacgatccaagacttcctggatatgcttctgcttttcaccgtgatctacaaatgaggcactataacccatcagaagagcaagacaaacattagcctgttcttcaacagtggaacctttgacaccggaattatacaaagccgtagtcaggcgataaacttcaccgttacgacgggaaaggtcgtcgctatagaccggattcccgtccatacctaaatacatcagatcgtgcgctgcacgctgaagagcaagtgtttcttcagaaagagacataatgatttatgatttataatttatgatttatcagctgttcaatggcaaccgccgatcatcaattatttgattacttctataagatccggatgaatggtagcaagcgcaacggcaataacaccttgtatctcgataaccacacgacgatcacgtgcaccttttactttcagaaaaatgccttcctgcccctcgaagtcaccgcccgtgatacgaacttttgtacctttggacaaattcaactcatcaggttggaagtacatgagatggtcattgtaagtaccagctactgcaataaagcgttgcatctcactgtcggagataatgattttctgaccgctacgggtatccgtaatgtattgcaaatagcttacctgtgatttgatgcgtttcacatccgaaggacgggcatggacaaaaagtaagttatgtacaaccggaaccaaagcacgaactttcttacctttctttatgctaatcttgtattgcatgggaacgaaacaacccattttttccttttcaagcagacgcatagcatcaggctctctacggtacgtggcacgcatcgcataccatatttcagtctctttatccgcttccatttcaagggttatttcagaaaagggtgttctctcggggctttgaagtccttacatacacttgaatttcaatcacttgcgaacactttatgtaagaaatggcaagtattgtgttcttcttgcctattgatttttcgtagctgttcattaccttgattacattgcaggtaaaaagctataaacgaatgaattaagctaataaatcgtcttttaatcgttcgttttatatgcgtaaagttttttaaatctgataaagtcagagaaagaatgaaaggaatagatattaactaatatttttacaagttttttatcgcttataatcagatatttaagtagaaaaaacactatattacgaaatcttttttatcaaacattttgtcattcaaaaaaacacctttatctttgtgcacattaaacgaacattttttggacaccccacaaaacaggatttaaacaactaatattcaacatattatcacccagaaacaaattttcatccatcattttccaccctactccccctcccattccaattaaattatctactttcgcattttttaaccacgttaatattacctaacggttaattaatcatttaagtcatgacagaattaaaaaaaacaagaagctgaacggaaatcagctgagaagtaaatcgtacaaatctgataatcagaaggaagacgatagtatagaacaagacaaagcgaatgtaataaatgaaaatttattagcttcgagaaagtattacggagcaaatacccatctgttggtaggcgccctgagatgcttcaaattaggcggttttgaaggtacggaagtccatacaatcagtgattttatagagtggtgggacagtacgggcaaaatcagaaagcatgtgaaaggaaagcatatacctctaaaaacaagcagcttaagaaccgagatagagagtatatgggcggtgatacagaaggaagatacagaacatatagatccctatggatatgatgtaaagattaatcagtaatagttaactccaaagaaagggcataattttgccccgtcaacaggatagtgaaagggctacacccttccaccgggatggtgtagccctaacctaaaaagggtgtagctatccgagacaaagggtgtagccatcacagacggttgattataaaccatttataaacaactaaaatcattaagatggagaaacaaacgttgggacaccaacaaaagtatgtaacgaaagacgaaagagtggagaatctatggaagaaactgattgggcaggaaacagacttatccgaagaaaccatcgcatggatggcacgacgaattttacaattaactgcctacatgccatacggatgtgcactgatagcctatcgaaaacaaaatggagatttttacatgggaagaggaacactgatacattacgaagccgatttccaccgcaaatacgacatcgagcgtattcagaaccatgtagtgtactgggatatagagcaacagggatggagaacgttccagatcgagaacttcctggaatggaaaccggtggtaagttgaaaattgagagttgaaaattaaaaaacaaaagattatggaatcatatctattacatgacgccaatgcaagcagtaattttaaaataatgatgatgatacagaaagaaggaatgaaaggatacggtatctactggatgatactggagtttcttagagtgcagaacggatataaggcagacgtaagaatactgcccgtactggcaagaaaaatgagagtgacagtagcaaccttgaagagaatcatcttcgattcaggactatttgaggtgaacaacacaaccttttcatcgcccggactcacacggcgcatggggccactggaagccaagcgcgaagcgaacagagaatcgggcagacgtggaggactggctaaccagcagagaatcagggaaggcatggcaagcgacgctttacctatcaatcagactaatgatataaataactccccctctatatctccccaaagggagacaggaaagaatgaggagattcttcttcttccaccggagtatgcactcaacaaaaatacacataattatgaaggactgatggaagagttgcaacgccaaaaagtaacggttatcaaggaaatcaatgccatcctcagactcacggatttcggaaagctgaaaggaaagatatggaaaatactctatgacatcaacaactcaccgcagatgaaagcaaggattgtgatgccgggaaaatatattctgaagctgttgcaaaattaaaagcatttttttaggtacacaaccaacagttgtatttttaataggcgaccgcttattaaaaatacaactttcaaccaggcaaaatcattcaatcttccaattctccaacgtatggcgttcgctatcaaaatttacagcaaccttcaccacaggtaaaccgcaaagagcaaaacgttcagggtagttccggaaatttatctgctgcatagcggtatcagcggatttatctaatttcagttccataacgtagaggacagtcgacgtgcgcagtactacatctacacggccacgcggagtgcgtacttcaacatcaacatacatgcccaacaaactaaagatgatatagaagacctgctgaaaatgaccttcggaacgaacattatcgcaataaggaacagtagataaaaactcttgcaacagacgcaaagcaccatccatatcgtcacggttcaaggctcgggccaagttcacaacggtagtgttagtggtcagcgtgtctctggtgatatacgaaggtatcagactgcgcatcaatccgatgcgaacttcctggttgggaatatcaagcgtatatataccgaattgggtatcacaatcttttatcgtaatatagccactctgataaagcaggggggtaataccggtcatgtgttccgtgggagcatcaaagtcggcagcgacagcctctgtcccacctatctttgagggtaaaacaccaaacttgttcagcatctccagcaggtaagtaggcgtaccactaccgaaccaataggaatccatcttgccatccgcaaaagcattgagaaggctgaacggattgaagatatcaggagatggccaagtaaagtgatagccgtcataattgtctttcagtttttccaacacttcgacgcggggcagtttcatcctggctgccaacagattcagatcatcggacatctgtgtcagtatctcatcctccgtaatgccacagattgcagcgtaaggttcatccatactgacattcttgatattgttcaactcactgaagatactcagctgagaaaatttcgtgataccggtcaggaatacatagcgcaagtaaggatcgcaagctttcaatggactgtagaaattacgcatcacattgcgaagcgcaggcaggttcttttcttcatgaaccacatcgaggagtggagcatcatattcgtcgatcagaaccaccacttgtcgtccggtctgctcataagcacgctttatcagtgctgtaaggcgtaagtttacatctacactttcattctttatgccaaatttattttcataatctgccagctggttggcaaggtagcgagtcaacgcatctttatccaaatgcttgcccagactcatgtcgaagtgcaacacgggatattgaatccattcggtttcaagagcatcaatggcaaggccttcaaaaaggttcttacgtccttcaaaataagcttgaagggtagaagtcaacaaacttttgccaaaacgacggggacgactcaaaaaaatatattttgaatcaaagtgcgtcatacgatacacatattccgtcttgtctatatatagataattcttggttatcagttctgaaaaagtctgtattcctatcggataaagccgttgttgctgggtcatttttaatcctccattattttgctatggcaaatataaaggtttcaccacagattgcatagacttacactgattattttaggactatgacatacctcccctgatcatcctacataaatatcagctgctttttaagcaagtccacaatatcgctttgcagcttctgcgcattgataggtttagaagtgtacgcatcaaaaccactgttcagaatgcgttcttcatcttcggcatagacataagctgtcactgccataatcgggatcgtcggcgacatttcgcgtataagttgtgtagcttcgtaaccggtctttttaggcatattgatatccatcaatatcagatgggggttgtattgcttgaatagctccaccgcctcttccccatcccaggcatggagaatgttgtactgacgcttcaggatagattcgaacaacaggaaattactctcattatcctcagctatcagaactgtgagtttgctctccactttattcaaccggtgttccttctgttccctcaccgatttgagctcaacgggacgataaggaagagtgaaccagaaagtagagcccttgccgggttccgattccacaccaatctcaccacccagattctctacaatactttggcaaatagagagtcccagtcctgtgccctgcgagaacgaatcaagctttacaaaacgaccgaacaccgtatctttcttgtctttttcaattccatatcccgtatccgtgatatagaaatagagaaaatcggtatttttcagatgataaccaaaagtaatgcttccactgggggtaaacttcatagcgttattcatcatattggttaccacttgtgtcaacctgttcttctcaatgtttacaaaacaatccggcatttccggcaggtatcggatgacaaccgcatcatttttctggcggagctgggcggattcttccaactcctgaaacaaggcattcagatctatatcagaatagacaaactcaagtgttccggactcaatcttggaaagatccagaatatctcctacgagttgcaacaacagggtattattgttctcgataatattgatgtattcttctttttcttccggctcttccgcatccgccagaatactggaaaaaccgacaatagcattgagcggggtacgtatttcatggctcatattagccaggaaagctgatttaagacgattggattcttctgctttttcttttgccgtaatcaaatcttcttccattttctttcgcccggtgatcacgagagaagaaccgatcaaagtaatcggattgcccttttcatcccgcttatcaaccgtggcctgagcctcaacccattcataacgcgccactccattcttgcggactatcacacgatattcttccttaattttagaaacattaccttccgtcagttccttataggctttctttacccgttccctatcttccttacagattttggcgaaatattggtaatcgggtacggaaagctgatcttcgttcatcatgctgtcgtcatggctaagctccaccggacgattcacatcacagagcatggtacccttttccagatcccatttccagggaacgatattcgccacatccagcgacattgacaatttatgattagcggaacgcaacatctgttgtgtctcggccagttcggtattgtctacgcagaaaacatcaatgaatcccttatgcttggaaggcgtcagaatcacattgaaataattacctatattttcgtaatagtattgataagaaagttccttttgagtggaagtaaccatgctatagaggtggcacattctttcaaaacctttcggatccgcctcacttccttttttgccgatgacctcacccatggatttgaagtatttctcaaaacgtggattggcttccacggtgatatagtccacaatctttcccgcagagtcgtaaatcagttgctgtttcaaataaacgataggcatattctcaaacaaactgtgataactggtcatcagtctgatctgttcttcctgcttttttcttgctctggacagccaccccatccgcagccacataaacaagagcatgatgactacaatagcaattatgacactatatttatgctgttcccagaaagagggcggcatcatataaaagactgaattgggaggacacaaaccaggcgataatccggcttccataaggtcgtaatagttgaacatgggagtaggcataccacagtctacgatacgggctcctttctcgttgacaccggataaaacaccgttggtaatctcaaccacttttcttccaacagttttttcatcaaagaaatagccgcctaccagaccgttccgctgcaatccggtattatctaatgagaagataggtgaagaggaataatagctcagaattctggaaatattattggttaatacgacattccctttttgagtatcctgataccatgagcaaaagagaactccgctgtttgcctctgcatggctcaatgaatccgccaatgcatcggtagtcattacaccggcaacataatcctttatttcaagttcgggaaagtccttgctcacaatctcttttaaatccgaacggaattgggcacttatataccgggcatccgacagaaatatcaactcatccatttcaggcatcaaatcctgcatcagcgaaactgtttctttgagatatgcaggtacatagaatacagtcagcgacaaatctcctttataatctttcaagggagttctctcttctaccggaatggcgcgcctctccagataagcctcttgcggaccgacgtaatccgtctccgtacaaagaatcacagggacatctttccattttttttctatatcatctctcagcaaaccccaggaagcactacctaaaagaatcaggagttttggaggattgtctgcatattttccgaagagactttcttcatattccaataattcttctgcattttgtaaatgcataaattgactgcccatgtgctccacatccactacataaggagaatttttatgctgataagaattataaatagggataataaagtcgttgctccatcgagaagagccactgtatgcgttgagaatcaatattctatcttcattgcccggtttaaatactgaagatacttcgccaaatacattaacagcatttaaaagaaaaacaactaatataataaacactctgattattatttgcaaatatttcatcgaaattacagtttagtctccaagtgtacccattctttaccacacaaggaacaaaaggtctacatcatagagaaattagactgcaaaactaattaaaaatcagagaattcccagtttttggaaaagagattttcatataagtcaattttaagagcaggtactaacctctatcaagtaccttcgcggttatcacactccgagtggaagtcgcccccaaatcaatagggatattctttgtccctacaccatagaatcgattggccacaatcggaaagcgatatgcaccctccggatcaatgattcccgtaccatttccggtagaagagttggtatcgtcactgtcggacagcataacacgtaaagtgcgtaatatattgccacttccgtccacaagctctactctcaatgtgtagtcattcgcatctaccggcgcaggcgcaggagcaggcaacacgtacgagcctttagacagtacagtagaagccgccgtccctacagggaccgggatttccaccaatacacgcccgccggaaacggaagttagcggactacttatgtaatctttaaatataggtgtctggctacgctgaagtaatgggacttgcttattctgttgtgcatacagagaaatacggatagccgaaacattcgtgccacttatctgtgccggtacattcgtgaaccatcccatcacacctgccacccgacgccaaaggtctacattcccctgagtgccgtaactactgggagtcagcactgttgctccggcaaatagttcggactgccggatggaggtccacgtacttgcctcactaccggaaagggtagcgaccgcgccggacaataccgaactgcctgtctgtatggcagcgggatatccataagtagcaccggactggttgtcaagtccaactgcaaggaaagtataaggtttcccattggcaagtccttcatacttcacccggtatctcatggtagaagttactgtgggcggattattgccaaagtaggccgaccaaccaatattctcagaagcgacacacagagcattttcatctgttccatcgaaaatatacagttgcacatacgtcacatgctgtacattttccgatcccggaagaatggtacgggtagccagttcgcctgccacacttaataaaagtgtgacatcgcctgcatcaccaggcagctgaccgggttccccccattcatcaacggcttcgtctgtctggcatcctaccattagcaacgctgatgccagaaaagtgccacatacatattttttaattcgtagatttttcattatgcatatcagttaaggatattatttgttcttttccagataaaaacgaccgacattagtagacaagattcccacgtctatgctggtttccggttgcgacagcgcatatcgttttccggtttccgtatccacaaatgaccagttccgccatgcgtctccctgtccatgcgtcagtttcagagtcacccgggcgggattacgcaaactaaatcctaccggaatacgattggtatcactcagctgctgaatatcaagcattttctccccggccacgctgaagacagcaatcacaggaggcatatcatcatccaataataattccgagtcttcgcctgaacgaaacgccgtcgaagcagacggatgcaggcgcaacaggctatgggcagaagcattgccaacacttgccatgaggaacaatgccggacgcgacaaatccgaacgggtggaagtcacggaacgggtacttctcatcaatcccgcattgccgaccgcctgtgtcagcacagactcggtaaacttcacccccaacgtagtagaagcactgttcaccgtaacaaagaacgactgcatcggagctatgaagcggaaatcatctccattggtaagcagcgttccatccgccctgatgacggaattattgctgttgccatcgtacaccttgattgaagtcaccgtaggattatccgcaaagaactgatctatccggatatgagccatgaacgggttccctaccagaaaggtagttccggcaaccttattagtcacagtcaccacataaggaaaggtaagactgccactgctgttctcgtaaataaagcgcccgggcagcgaacgggtgacggtttcgctgtaagccgttccctgtcctgccgcattataataattgtagcgggtatgcaccttcgggaaacggaaggtaagtactgtattgcttaccgcctcacggtccgctaaaagcgaaaaaccactccccacaggatagacctgattcagagcattgaacggtggtgtccagttcgtcttatccggtattacggtaacagcggtaagcgtaccgccgctaatcttctgtcccggtgcatcgtggctccacagccgttggtagatgcgcggattaaagcggttttcgggtgaagtcgtttcgttcaatgtcacaaagaaatcattattctgagtaccgttcatagtggcgggaataaacatatccccggtatacgtggctttcaagggggcagaaagcatatagtaacgccctgcctgtaaggccatttccacccatgcctgagcgtaattgaggtaatgcgtattcactatttctgcattcggagcgaaatggagattattgcaataatttacactaccttgaagaagaacgggatagagaacacagccggacggaacaatgacatccgtacattgccatggactgccgtcactccagttgttccaatcgttccaattgcttgatgctgcattcactttccaggtagtacgcaacggatgcacggtggagtggatgccgttataataaagattcgtacccgtggggtcatagatagcgatataataatcgcccacgggcatggcggaaaggataaatgtctgtcctgccagcgttgccgtgcgctccgttatttcattattcttagccacattgtaacagcgcagcagatagctgttaccgttcgttccgccttgtatctgtatctggatgggcgatccctggcaaatatgctctgtcacgctgatcacgtctatcgaaccaccgggatcggtagtcgtttcggcacaatcgggaataccgtcaccgttactgtcgggacgagtatagacacctgccaactgaatgctcttcaaagcatccgccactccggcaaaggtgatacgcacttcatcaaacggcgtggttacaggcgtggtttcaacaaactgcttgcctccgctacctatgacgtccagtcccagtagtccgcctgtcccggtacgtcccacttccacacctgcgttatatacgctgactgtagcccaggagataagttccgctccggtcacgcctgtaggatctacaacaatgaatcctaccggttgtttctgttgtatctgattgaattttaccgctacggtaactgcacccagtacattagtggtggttacaagcgcataactgttgatgtccgaatctatgagattgcccagattattgaacgaagttccaacgttggctacaccggtgctacggatggcagcataattggtgctggctccataagtggtagatgtcatcagttgcagacaggcattggcgatactggcgctgtagcaaccggcactggcactctcccagaaagcataataaatgcggaaagcgttgagattgaggttgagcacaccgcccgtccacaattcaatggcatcaaattcctgattggtatttacacttatacgtattttatttccgctgtcacctatcagcccggcagaaacggcattattattatccgcagcattctcaaacaccttcacaccgttgcgatacaagcggattataaagaatttcagcacatcagcgctcaacagcctggtagaagtctgaatgacgaaacctgtacggatttgactcttcgacgcattgacaggcttatccgaagctgtcctgattcctacgatagaggtgttggcggcaatacttgccagattattgtaagtgataaaattgtcggggttactatctatcagattattctttcccgtgaagttggtgccctcgcctacacaaagcagacatccgcctcccaaaggggcatacacagcggcgccattgccggcattggtaatcatggtattgcatgcatcagtttcgctgatactgctggcattacgggtgattacggcggtttgggtatatactttcccatcggttccgacataggtacccatcactttatatgtcccgttcacggtcatgcctgtaatcttattgttactgatgacgggagaagagcctgtaggagattccgtaatggcatacgacacgcttcccgtgacaggggttttcagttgatagaaattgcccgtgacagtggcgtttcccaacgaaaaataagcggaagcgtctaccaacacctgattgcggacataagcgtaattgatggtagtggcactcagtacattcaggtttacacctgcaaattgtatttttatctgagtacaaggtttcttcaggatcatgctcacctggcttcctcctccggcaatggccgaaattcccaacaggctgctgatggtaacctgttcctgttgctggttggcggcattataggtggtcagtatggtagttcccaatgcactgatggttaacaaaccgttataagaaaggaaatagccgacctccgctcctatgggaatttcttttttgaaattgatagtgacgtgtggctgagtaagtgctcctatcagtccgaaagatgggccatcggtcagattcgtattgataagttgggcgctgttcagcatattggtccatccggtatcgaagagagcatcgttgtgaacctccacaccaccggtgaaatagctgcttcccgtgatggcgggttgaataggattttcgcctacaaaagcgtaataaagactgagggcattcaatacgtcggcagaaatgccatacataccgatcttgatttcatcaaagggtttggtcagttgggtagtaatggaaatggcttgctgaccgtcattgttagcggcactcagcaggttcagttccaatgtttgtacttcctgcacatcgcttcctttcatttcctgctccactcctttcaggaaggttttcagccagaaacctttcagtacattgacattcagcaaagaagtgttgctgattttatatacaaatcctgctgtctgcccaccggcgtaagtgcggtttacatcacgtacggaagctatctgattcccaatcaaattggccgtaactacaccgctgaacgaagcggagttcgtgatgtcagtatccagaatattactgattccctggttattggtaagtacttcgaccaaggcattcgacatatcgtctacgatacgtccatcgcccaccaaaggaactctccggctggctgtccatgtctgtccaccatcggtagaggttaatgcggatatttcggcggatgctgctgaaaccgctctcgataacgttgtgtcatcgggaatggacaggaactcttcatcctggcaggctgaaagactaaggaggagagtgaaagtcagaagtgtatgaatggttttcatctctgtatcattttaggatgcgtgaggtatttttttagagggtgtttttgcaacaccctcgctatatatccaaggtctgaatctactattcgagtcctaaattataaatcacatcccaggcatcgtttaccgtaacggtgattaccgtttcctgagacaggtcgataggctggtcatcatctcccgtagttcccggatcacttgtacctccatctgttgtggcagaaagattctttgtacctatggagtagaagtagttgcgctgaacgtcatataccgatttatctccggagctgacagcactgttcaccactttccatgatttcaacacagggctactaccacttacttcattggcttccagctgaatggtaaaggtcggagtatttgtaacggcactgaaaggaatgaggaatttgccacttaccaatgaattggctaccgtagctacggaacctgttccggcagcaatcgtgaatttcttggtcagatcagaaccggcagcactgacttgagcagcataatcggacagtatagaaaggtcatattccagcactttcgttttcgtagcgtttccggtagcgttcaccgacatggcgcttggaaaggtaaatgcgctggatgcagaagacgcatagacgcgtatgtacttcacagtagtaatggctcccgaagcattagggtcaggatacttcaccggaatgttcttaaaatatcccagcaaacctgccacctgacgtttcagttccacttcgctggcagttccggctttgaggttaccgttttccacttcaaaggtagctctaccggcaaacagttcggacacggttgctcccggaagggtagcggtaaaagcatccgcagtattgccaccaccgctcactgtatagtcggcaacgtcattatagccatacactacaatggtataagtaccatcagccgccagtttattcagtttaatggtttggctcgccttatgctcatccgtaccgggagtcgcggcatccgagggaccggctgtccaagcaagcggattggcggttccggcactcaaggctgccgcagttacatccgttccactcgggttataaatataaatctgcactttagcaacgttattggcagcttcggaactgtttacgggacgattggcacgggtattcaagccatctccaccactgtttagagacaatgtgatttcggacagggacggagggtcctgcttgtccatagcaactgactcgtcatcactacaagctgcaagcatcatcatgccgacagcagacattaaaacatactttttcatttttagttaagtttttgagttaaacattcgagaaaaaacaatatcaattaatattcaggtcataaatcatttcccatgtatctcccatcaatatatagatgaagaaatcattccgttcttcactatacgcgtatttcaaggtggtcagttcattacgcttcagggtaatatttacatctttgggcgtaaagtcgggcacgctccgcgtcaaggcattataaaaacccagatgcaacacagactgcgcacttccagtagaaggggcaagaatggagcttaccacaatctcctccgccgattcccaagtggccattttagccacactgatagggttcagatagttgaacagatgatttacccgttcgtaaatccggtctatacgctcatccatatacctgctggtagcgggcaggtcgaccacctgtaccaagagcttaccggtgacacgttccatatctaccgtgaaatgattattctgataatcgtacacaatggtgtcattggtcagatagacatcgctgccttcttttccgttggcgtgtatgatatgagttaaggcagcgtcagtcagcgaagtgtcgtccggcatccctccccatactgtcagcacatacttcccggtgggcagacattcgcaaaaggtaatggaataggttgcttcggaaccggtaacgctgaatagcccctgttcctctacaacactaccggtttcggcatcacgcaagacataatgtaacgtaggaatatactcgcggaaagggagcatttcactcttacgggtctccaacggcacattgctaatgttaaaataatttttatctttcacgataatattcacctgcaaaggcgggcatacttcagaatcttccttgatacaagaaacaaatgcgagaaggaagagtagaaggaatatccctagacttttccatccggtaaagatggttaccgtaccatattgagtaccttttctcatggctatttattgggaaattggtttcatgatttttcaattttgcgattcaacgaatatcgagatttctttgttcacagaaatatgataattatttttagagggtataaactcgtacaatgggtttattgattattatttgcgtattttccatattctacctacttttgaaagcataaaacaataaaatcaatgaaaatacttcataccagcgactggcacctgggacatactttatataactatgaccgtagccacgagcaacaagcatttttgcaacaactaacccgcatcgtagcagaagaaatgccggatgcaatggtagtgagcggagacatctatcactactccaccccatcggcagccacacaaaagatgtacacggatggtatgctcgaaattcacagggcatgtcccggaatgacgattgtggtaactgccggaaaccacgacagcagttctaaactggaaatagacagcagtctatggaaccattttggtgtgaaagtcgtgggaaacatcgaacgcacccgggaagaggtgaatctggaaaaacacatcgtggaagtaatagatgaagcggcaacactgaaaggatatatcattgccgtcccccacgtctatccacagaatttcccgatgctggacactgaaacgccacgcgaagaacggcaagcacgcttcttccaggcattgctggacgaagtaggaaaaatgaacacgggaggattgcccgttgtattaatggcacacctctccatagaaggcagcgaccggacggggcatgacgaaaccgtgggtggaatagaatacgtccccatcagttccatgggcgaaggatacgattatctggcactcggacacattcattgtccgcagaacatcaaaggaaacggacggcatgcacgctattgcggtacccccttacccgtcagtttcgacgaagcttatccacactccgtatctatcgtcgaattaaaaggacgggaagcgccacagataagggcaatagaaatagaaaatccaataccactcgtcaccctccccaaggaaccggtagtctttgaagaagccataaagttactggaagaatatccggacgataagccggcttatatccgcctgaatgttctgataaaagactatctggcacccgactgcaatgaacgggcatcgaatgccgtaagaggaaaaagctgtaaatactgctatatcaaatccaaccgcgaaaaacaaacttcagactacatagcccggcacatctccatccaggaaatgcaggaaatgtctccgctggaaatagccagactttattatcaggaggcagaaggagaagagatggacgaggaactctgtgaactgatgagcagtgtcgtacagaaagtgagagaaaagaataatctgcgctaatccgtgtaatctgtggtgaactatgaaacttaaaaaactgactataaagaatctggcctcgatagaagatgccgtcattgattttgagaacggccccttaagtgaagaatccctgttcctgatctgtggcgaaacaggcgccggcaaaacaacattactcgatgccatttgcctggcactctataatgaaacgccccgcatggaacgcacagcaaatgaaaagtaccgggatgtagggcaaacgttttcttctaaaaaggaagatgtggctataaacgacagccgccaactgatgcgacgaaataccagtgaagcttggacagaactggaatttatcggatcaaacgaaatcccttacatcgccaaatggtacgtagcccgcgcacatcggaaagcatccggtgccattcaagacactaaatggacgttggagaattgcaaaaccaacctccaactcaccaagagaaacgaaatcaaagcggaaatacaagaagccgtagggttgaacttcgagcaattctgccgcaccaccctattggctcaaggagatttcactaagtttcttcagagcaaagaaagtgagaaatcggacatcctggagaaactgacaggtaccggaatttattctgaaataggtgcagggatttatgccataacgaaagaaaagcgcgtagactatgagaatcagaaccggaaactggaaggaatccatgtgctgactgaagaagaaatgaccggaattaacgaaacaatggctgcgttaagtagcgaaatcaacggaaataccaggcaaaagaacatagcagcactgaaacgtgactggctgaaaagaaatactgaactcacccttactcaagaaagtcaacagagaatctggaaagtgaagaaagaacagttacaatcggatgacttccggcagaaagaactactgataaaggattggaatcacactgcggatgcccgcaattggctctcctctttcaaacagcagcagtggcaacaagaaatcaatgccgaacaaaccgaaagcttgaagcaaagtttcatccgcctcagcagtggctgcgtttggctgaaggagaatatgaaagagcaacaggcaaaactaattcttgctgaagaatatctgcaaacccatgcaccgttcctgcctatgttcgagcagagccagtctatcatcaccgatttgaatgccgtgctctcctcacattcccgcatctccatttacgaaaagcagatagtggaattagtccggcagcaacctgcccaagagcaagaacgcacaaataaggagaatgacttcaatctgaaaagcaaagagaatcagatcaggcaacaggaaataaaccaactgaacgcacagcttgattccatgaaccgaagtgccttgcaagaaaagaaaagtacattggagactatcaaagagaatttgcagaaagctcaaaatgccctgatagtactggaagataaaaaggcggctttggccacagcagaggaaaacgagaaatcactggaaaccaatctgcaagccggcaagaaccggaacgggaaacttaaaaacgaattcgacactcaaaagaaggcgtacgatgacctcaaagagctttatgacaaacaaaaagaagctgtggaggaatgggccaaagaagcccgtgcccgtctatccataggagatatgtgtccggtatgcggccagaagatagaggtgctcagcaaggacgaagattttcagtcgatgcttgcccctatccggcagtcgctggaagcaaaagagaaagaatacaaggaagcggaacaagcattaaacagcaaccgggcagaggtcaaaacttacgagaatatgataacgaacagccgcctggcaacagaaaagacccgaaaaggtcatgatcttgcccgaacggaagcagaagagcaatgcagtcggtgttctatttcaagcatctccgacaataccaaagaaatactggaaaagttatttcaggagaataaactgaatctggagaatgtcaatgccaaactaaatgaaatacaaaccctctccaaccatatttccaggctgcaacatctgaaggataatcaccagaaagctgtggaagccgcccggaatgcattggacaccgccgacaaaaatctgacgaagctgaaaaacgatatcaccaataagcattcactggcggaaagtgaaaaagagattgttcgtactacgctggaacgcgtcagtccactgattctttgggaagggtggcaaacggagtggcagacctcccctaccgcttttatcgaacgcctacagaaatccgcagagcattataaacttgcacagaacagacaggcggaattaaaagctgccatcgccctcatcgataaagaactgagcagcatatccgccacacaagaactgatctgtacggctttccctgaatggaggcatcttacggcaaaggaaaaaatggaaatcaagaatctgggaatggcgtggaatacgctgaattctgaagtcggcggactgaaacagaacatcctgtctgtccggaagaatctcgatgagctacaagccagcctgacaacattctataccacacacccggatatggacgaagcacgcctcatcgctctttcctcctactccaacgaacaaatagaatctctgcgtagcggacagcagaggcttagagaagaagaagtggcagcacagacagccttcagacttacaaccggccaactggaagaacaccaaagtaagaagccggaaatggaggaagaagaaacccttgaaagtctggatagtcttatcactgctttggatgaaaagatcacagcaggcaatcagaccctcttacgactgaaaatccaattggaagagaatgcgaaaaacattgcccggataaaagatgagaagaaacgtgcagacgaattgcgggaagtttatctgaaatgggaccgcctttgccatcactttggtgacgagaaaggaacgaatttccgaaatattgcccaaagcttcgtactgaaagaattgctcaatggagccaacttctacctgcaacgcctgaccgaacgttacgagttggaatgtcaggcaggttcactcaccattctgctgcgcgatttatatcagggaggtgcggcacgtccggcctgtacactgtccggcggagagagtttcctggtttctctgtcattggcactcggtttgtcttcactcagccgccatagcctgtctgtagatacattgttcattgatgaaggattcggaaccctgagcagtgattatctgaacacagtaatggacacactggagaaactgcaccagatgggcggcaaaaaagtgggtatcatcagccatgtagaaggactgcgcgagcggatcaagacccagatacaggtgaagcgaattgataattcgagaagtgaaatcacaacagtgaggacactatgaattttattgtgtacttttgtagcaactattaatagaaaaagacaatgaagaagttcataaaaggagtccggtttgctcctaaaaactattccgacgaagtagaagtgaagattcaacactataaaaaggaaggttataaactaccgtcgcgccacttattgcgcaccgaagaacaactggcgggtatccgcgaaagtgccaaaatcaacaccgcactgctggattacatttctgcaaacatccgcgaaggaatgtccactgcggaaattgaccacatggtttatgaatttacaacggatcatgatgcaatacctgcccctttcatgtacgaaggtttcccaaaaagtgtatgtacaagtatcaatgacgtggtatgtcatggcatcccaagcacgaaagagttcctgcgcagcggagatattgtgaatgtggacgtttccaccatttataaaggatatttctcggatgcgtcacgaatgtatatgattggagaagtgaagccggaaatgcaacgcctggtacaggtggcaaaggaatgccgtgacattggcgtacagacagcacaaccgtgggcacggcttggagacgtcggtgcagccattcaggaacatgcggagaaaaacggatacagtgtagtacgcgacctgtgcgggcacggcgtaggaatcaagttccatgaagaaccggacgttgagcacttcggcaagcgcggtacaggtatgcttatcgttccgggaatgacattcaccatcgaaccgatgatcaatatgggaacttacgaagtcttcattgatgaagccgacggatggaccgtctgcacagacgacggactgccttcggcacaatgggaaagtatgcttctgattaccgaaaacggcaacgagatattgactgaataagcatggatattgtttttctaattatcggtcttatagtaggtgtcggcgtagggtatctgatagccggacgaaaaagtgccgcgttgtccgcacaactgcaagccacccgcgaacgggaagaactgctgaatcgtacggtagaagaacggattgcacgtgagagaaccatcacagccgagcgcctggcggagcaggaaaaatctttcaatctgagactggcggagcagcagaagcaatgggaagaacgtctgaaattgcaaactgaagaagcggaagccttgcacaaacgcatgagcacggagtttgagaatctctccaaccgcattttcaaaagcaagacagaagacttcaccaagctgaattcggagcatctcagcaatttactccgcccactgggggaaaacctgaaagatttccgggaaaaggtagaacaagtatatgacaaagagtcgaaacaacgtttctcgctggaagaacgcatcaaagatttggtagaactgaacaaccggatcagcgaagatgccaacaacctgacccgtgcgctaaaaggtgattccaagatacagggcaactggggagaaatgatactggaacgtctgttgcaagcttccggcctgatagaaggcgaacattatttccgccaggaattcctgaaaaacgaacagggtgaaatgctgaccaacgaagaaagcggtcagagaatgcagccggatattattgtcaggtatccggatgagcgggaaatgattatcgactccaaggtatccctgactgcctatgccgcctacaattccgccgaaaacaaagaggaagaggctcgctggttgaaagcacatctgcaatcggtacgggcgcatgtggatgaactcagccagaaggattattcgcattatgatgcaaaagcaccggactttgtgatgatgtttatccctaccgaagctgcctacctgacggcgatcaaagcggataccaatctatgggaatacgcctataataaaaaggtggtattgatgagtcctaccaatctgatcagtgcgctccgcctttccctcgatctctggaaacgggaaaatcaagtgaagaatgtgcaggatattatcaaacgaggtacattgctttacgaaaagattgccggatttacagatacattcctgcgcatcggtgacaatctgagcggattgcaaagagattatgacaaggcttacaaccagctttcggatggcaacggcagtgtggtaagacaagccgaactgctgcgtaatatgagtctgactcctaaaaaacgaatatcagcaagactgctgcccaaagaagaggaaacggaggaggaagaaaacggacaggacaaatagacaatccaaattaagatatataaaacatgaaaatcctaaaagaccgtatcctgaaagatggaagatgctaccccggaggtatactgaaagtagataacttcatcaaccaccagatggatcctatcctgatgaaatccatcggtgtggagttcgtcagacgttttgcctccacaccaatcaacaaaattattacggtagaagccagtggtatcgctcccgccattatggtaggttatttattggaattacccgtagtcttcgcaaaaaagaaaaagccgagcactatggagaacatgctggttacttctgtctattctttcaccaagcaacgctcctatgatgtatgtgtcagtaaagactttctccgtccgggcgaccgggtacttttcatcgatgatttcctggccaacggaaatgctgccaaaggtatcatggaacttgtgaaacaggccggagccgaactggtgggcatgggcttcatcatagaaaaagcctttcagcatggaggtgacgaacttcgtgagcaaggtattcatgtggagtctctggcgattattgagagccttgacaattgcgaaattaaaatcaggtaaaagtatttatcgtacatctataaacttacagccggcttgtttatgaatcaacaagccggctgtttcgttataatccgagtatctatttttattcagtaaagcattatttatgggataaagttgtccgaataacttctttcacatcttccacgattcccatagtaacatctttatcaaacttcagtcccactgataatccatcgctgttggcaaccgttcggtaatcctttaacttcaattccaattcctgaagagaaggattctttatcactgagcttgtacctcctttcggatacaaagatacttctatgggtaaaaatatatccgaagccgtcttatatttagaactgtaaatcttaggttctccaaaagaaacgaatataggaagcaaactatctaaacgagcttcggaaactccgcctaattctccggaaatttctccacgaacttgtagataagcctcttttatggtgcgcaggtaagaagtgatagcggtggatgacgaaccacggtcatatctcacaaataaaccaggaacctgccttttatccgtatttgcaactttcctatattctttcctcaagagatccttaagacgggctgataaggtttccacatcatattccttaatcaattcctgattcagcatcatcttatttctcatatttacaaagaaactataaaaacgatccgttgatttctcagtctgagactccatctttccgcccatagcatcgttcgctttacgagtgaagaaagcctccaactgttgcaactcgctctcctgaactgaattttgtttcacactcgcagacgcgtttatcgcctgctccactgtctttttaacttccggacgcgcaaatgcataaagcgttccggcagctacgggcacaaaaagcaatagcttcaaacgcgcccaattgtttgttcttctttttaacatcattgtgatacgatttttaagtttgctgtgattgaacccgcaagccatagagtagagccttgcacccacggacttcttcactagcaagagttgatattctgttgcatcgatgccattattaataacgccattatcggcttcatattcatgcacttcacgaagttcacgcatcaggagccatgcggcaggattgaaccaatggaatataacgatacattccatccaaagtaaatccaatgtatgtctatgttgcaggtgcatttgctcatgcaacaggatttctccggggttccgttcgtaatcctcctgtgacaggacaatggtatgcccccaactgaaagagactatcttctccggacagatgaccagcttgtatttcccgtaattacaggcaggatagctccggataagccggcgcatacggatggtagaaagcaagaggaaagcaagcactatcaaagccccgataaaataacaactgcccaacagccagatcacaggaatagtatgaatcacattcgtacgatctccctctataccctcccctttctctgccatcaaaagacttgcttcttcagacaaatgcttttcacccgttcctccttctctttgaacatctatttccttctcagtcaataaatgtcttacagtagttattggcaactgcaaggttgtatattgaggaacatctatttgcagcaatggaagtaacgtacatgccatcgttcctgccagcaacaaaaaacggttcgtacggaacagcgtatctttcctgaaaaacaatctgaacagaaagtacaggattgtcaggcataaggtagactcaaatatataaaacaaaatagttcccatgatctatttatttgccgggtataactctatttctatctgttcgactttttactttcgatctctgctatcaacgcttttaactcgtctaccgacataccctcttcttcaataaatgtagatacaacattggtataagagttattatagtattgggctactacgtcattcagtgcagaacgcttatattctttatcggaaacagccgcatagtactgatacgtgttaccataggccttgtatttcacaaagcctttttcctctaatcctctaactaaggtagatacggtattataatgaggtttcggctcttcataaaaagccagcaattcacgaacaaacatcggaccatgttcccagaacatttgcatgatttcctcttctttagcagttaatcgtttcataatattttcaggtttatttgggtgaacaacgcaaagataggaattagttttaaacaaacaactaatgctattagttattcaactaacaaaggaagtagtttaactaatattattagtagatagtaaatacaccttattatatatagaaaaagagaagaagtataagggcaaggattgtttgcagcagaagagaaatcaaatacattcagtcctgaatgtaagttcattataagaaacaagatgtttcatcatttgaaaccaacagtttcaccgtttggaactgaaggtttcatgccttgaaactgagagttccatcgcttggaactaatggtttcaagcaatgaaacttcttttgcaatacgaagataggtttcgtactcttatttatactttctttttctttggcaatacctggttcagtaccacatatcccagtattccggcaataatagtaccacacaacacaccgaatttagcttgattcagcagttccggataagcatcagagaaagaaagattggctatgaacaatgacaccgtaaatccaacgccacccagcaatgacacgcctgcaatatttttccagttcataccttcgggcatacgggcaagcccgcttttaatagtcagccaggtgaaaagataaattcccaaaaacttacccaaaagaagacctaagccaacagcaagacctacatttcctataacttctccgccaccgctaaaaacaactcctgcattggcaaaagcaaataaaggaagaatgacaaaattcacagctccatgcaagttatcctccaaagattgtaaaggacttatcacacgatccgaagcccgctccacttgctttaatgtagcaatctgttcgtttgtcaatacaatgttatcagattgtaccaccgggaaagaactgacaatagcccggatacgccggatatatttacccgcatccagccgtggacgggcggggatcacaaatgcaagtatcacaccggatattgtgctgtggatgccagattgcaggaataaataccagataataatgccaaagaaaagaaagaagatcttctgtgtcataccaaactttcccatataatataagaacgtataaagtatggcagctacaatcaaataaccgtaagcaacctcggagctataaaaaatggcaatcaccagaataccaccaatatcatctaccacagcaaaagcagtcaggaaaatcttcagactcaacggtacgcgcttgcccagcagactaagcactcccaatgaaaaggcaatatccgtagccataggaatagccatgccttgtgtttcaggagtaccgggagttaccagaaaataataaaccagaaccggaaatatcattcctccacatgctgcaatgaacggcagaatagctttcctgaaagaggataactctcctaccagtaactcgcgttttatctctaaccccacagctaaaaagaaaatcgtcatcagacagtcattgataaactcaatcatcgtcagattatgaccgccatgcgaaagcaagttaaaatcgccaatacgcaaatgcagttcctgcaacagaaagtcctgatacacagaagacagcgaagaattggccacaaccgcagccagaatagctgtcaagaacaataagatactcgccactacattcaatgacgaaaagtttttcacagtacgtagaataatcatatattcaatttcaatattagatttccaaaggattctccggtaccgttaaagaactattcctgatagctcattaacgccagttttttaacccaaagcacaaatatacctgttaatattaaatttaacacaatagtaagcacagaaattactaatgccgggccacccaagttgtaacccaacgcaatgaaaataactcctgcccctacctcaccacgggtaaacataccaatggaaagtgccagacgttcgctcaatttacggtcgcgatagaagaataccggaaataacttacctacattggaaagtaacgatacaataaccacatgtacaataatcaatgcccaaggcatcatttcctgagaaccggttatagaagccagccccgtatcaccagggagactgattccctgaagcggaggcatactcataccaaccaggaacatgaagataaatgaaattccggttgaagctttacgctcccagactgtatcaatatccttatgtttcatgaccatacccagaacgaatgccggaagcaacacctcaatatgaatgctggcatcttctccatataagttctttgtaataagataaagcgattgagtggcggcaaacaccaaaacggaataaaacagaatggctttccaatcctgccgcatattgtatttactcagtttcttccaaccgaaggaaagcaacagaaagacgataaggataattaccaacaactgccagcgaggtccgatcatcattatttgcaaaggaatcattaagaggatggtatccaaatcatcaaagatggccagcacctgaatcttcttgtagatccagctggacttcagtccgatagccgccaacatagtgaataatatacctgcggaagtaggagccgcaaaacgactcagtaacaagttttctttccatgcctcccaactattccagtattccggcggaagtaaaacaaaaatatagtaaatagcaatcagaaaccaaggcatggcggccgtagccatagcaacgaaataatcttttgcgtacgtttgccatcgggacttgtccacctcaaactcacgtcccacattgatcataatgaatcccagacaaatatacagtaacacattagatacagttttcaccgtaccataatcactccctgaccatgcaggcagatattgcgctataaagagacctaccaccaggaaggccgaaaacgatagaacttttctcatttattattagttagaattttcaaaacaaaggggattgtcaagacagtcctacagaaagagaacaatccccggactaatatgaatcagcttttatgcttttttatattaatctaatttcaacaccgcaaggaacgctttctgcggcacttcaacattaccaatctgcttcatacgtttctttcctcttttctgcttctccagcaattttctcttacgactgacgtcaccaccgtaacactttgccgtaacgtctttgcgtaccgccttaatcgtctcacgagaaatgattttagctccgatagccgcttggatagcaatatcaaactgctgtcttggaatcaggtctttcaacttctcgcacatacggtgtcccaaatcataggcattgtcgaaatgtgtcagtgttgaaagagcgtccaccggttcgccgttcagcaaaatatccagttttattaacttggatggacggaaaccactggcgtgataatcaaaagaggcatatcctttcgagatacttttcagtttatcataaaagtcgataacaatttctcccaaaggcatatcataatagatttccacacgattacccgaaatatattcctgcttcaccagttcaccgcgtttgcccaaacacaaagtcatgatgggaccgatataatcggtagttgtgataacggaagcacgaatataaggctcttcaatgcgatctatcaaagtaggatcgggcatacttccggggttatgcacctctgtcatatgaccttgtttgtcgtaaatattataagaaacgttcggcacagtagttatcacgttcatgtcgaattcacgatcaaggcgttcctgcacaatctccatgtgcaacagtcccaggaatccgcaacggaatccaaagcccagcgccaacgaggattcaggctggaaggtcagtgatgcatcattcaattgcagcttttccaaagaggaacgcaagtcttcaaagtcttccgcttcaatggggtataccccggcaaaaaccatcggcttcacttcctcgaaacctgcgatggcttctttacacgggcgggcaatgtgagtaattgtatctcccacttttacttctttagaagttttgataccggaaataatgtatcccacatcacctgtacgcagttcctgacgcgccaccatctccatcttaagtacaccgacttcatcggcatcatattctttaccggtattgaagaatttcaccttatctcccttacggatcaccccgttcacaatcttgaagtaagcgatgataccacggaaagaattgaatacggagtcgaagatcaaagcctgcaacggtgcttcctcgtccccttcaggatggggaatacgctcaataaccgcagtcagaatctcttctacgcccataccagtcttaccggaagcacggatgatttcactacgtttgcaaccaagcaactctacgatttcatcctccacctcttcgggcatggcactcgccatatcacatttattgatgaccggaataatttccagatcatgctcaattgccatataaagattggaaatcgtttgcgcctgtacaccttgcgaagcatctacaatcagtaatgcaccttcacaagcagcaatagaacgggaaacctcatacgaaaagtctacgtgtcccggagtatcaatcagattcagaacatacttttcgcctttgtacgtatactccatctgaatagcatggctcttaatggtgatacctctctctttttccagatccatatcatccaacatctgtcctccggtcacctgtatggtgttggtaaattcaagcagacggtcagctaaagtagacttaccatgatcaatgtgggcaataatgcaaaagttacgtatattcttcattttctacaattatctatctataaataagtatattacaaaatgaggctgaataactcgtagtacagtcgcaaaacaaaatggtaatatctcgcaacgggctcgcctccttttgcgggcgcaaagataatgaaaaatatgaggttttgaaagtgatttattcaatatccgaggtcgtaaatgtctatatatcctaaaactattctatcatcccactgttatgtatgcataataacctaaactgcataactgaaatgaaaaaatttattatttttgcgtgttccctcctattattggccggatgctccaagaatgagataatcatttatggctcatcgcccgaaaacaatgaatccgacaacagtcagccttcggaaaaagaagatgcactcatcaccttttccgcttcactcgaaagtcgtaaagtaaccagatctatgtcgcccatgcctaaaggtctggtaagtcagatttatgcctttgaaactacagacaggaatttcgatgacccttttgccgaaggtttgtattcaaccgcttccgcaggtgtattgaccggattgaaaggctacaaaatgtatttgagtaacggatcatataatatgtatgcgttttctgaaaactcctccgtttatcctccagacctgatagatggaatatccgctccgttaaagaatggcattgactatctatggtgggaaaatctggatcaagacgtcacaacttcacaaatccacatgcccattgtattccagcatgtagccacccaggttgtagtagacttatcagccggcgacggtataaaactggacagtctgatttcagcaagtatacttcctcccactccgggtgccactctcgatatacagactggaattattgaatccacctacacctatgatactgctccgctcactatggggaaaaatggttttctcacgcaggccatcgttctaccgacaaaagctaccaatcctatgtctttgacgctacagatattggcagacggagaaacgactccacgtacctataccgtaggcattcccattccgggcaaactggcaggaggattttcgtacgtcttcagtgccattatagacggaaattccgtatcgttccccaatgtcagcatcaaagactggaccgaagtagatgaatccggtaacccgctttatccgacacagaaataataaggatcactcttacatcctccaaatacaacaacaaagtagaaaatatggaaactaaaatatctgagatcagaaaagagtatactagaggcaaattgacacaatgcaccatcaatgacaatccttttgagcaattcgaagagtggttgaatgatgctattgtccacaatgcggacgagcccaccgccatgatagtagcaactgtctcggccgagggacatccttctacacgcaccgtcttgctgaaaggagtggaaaacaacaaatttatattctttactaattatgaaagccgaaaaggaaaacaattggctgataacccatatatttccctctcttttgtatggcacaaattggaaagacaggtacacattgaaggtaaagccgaaaaatgcctcgaccaagtgtcggatacttacttttccagcagaccctataaaagcaagataggtgcaaggatttctccgcaaagccgggtgataagtagtcgtatggagattatgcgggctttcgtaaaagaggtcttcaagctggcgggacatgaaatcagacgtcccgacaactggggtggttttgccgtaactcctacccgcttcgaattctggcaggggcgggaaagccgcctgcacgaccgcattcagtatatacttcaggaaaatggtagctggaaacaggaaagactggctccttaaacatcccttgtcaatggactggaacataaaaagaagcgttgataacatataaatgtatcaacgcttctttttataagataaatgtcaatctctctcttaaaccaacttaacaaacagttcgccttctacttcctgagtagagatcttgtcttctctcagcaaccagccaaggcccaagaacaaatctttgtctaccaacttagttgctttcttgatttgtttagcagttaaaccttcagtctcattcagagcactccaaatttttcctgcagtttcaccagctttttcttttaacattttccttttgtttttagttatacatgctttaatctaaattctctcattagcgaggttcagattttatttcagcggcaaagatagttatatttatgttatataacacattattctctgtttttttatgttatatgtcataaaaagagcatttattcagcaggtcagaccaaaaagaatgattcattcaagcgaaactgatggtttgtttacattaaatagacggtctgttttcaagatattccgcccaaatgcgggcagcttcttccaccatcctgacacacggacgtttagcataatattggtcggtgcgttcttcgggagtagacactccttccgacttcttcaaccccaataattcagcacaaattgtagagccgttccgtttcttaaactcggcagccaattcctgtactactgcataattggccccttttccttcacgatctttgggatcagtcgctccggtttccagtccggcaagcagaaacataccacatgcagcgccacaagtctgacgcatacgaccgatacctccaccgaaggaagctgccatacgcgccgcctgttcttgcgtaaatccatacatgtcggcaaaagcaagcaccacagactgggagcaattataaccactcttaaaaaactctaccgctttctctattctttcttcaaacattaccctatcctttttttagccttctatatccaacaacatgggacaatgatcagaatgtacagcatcattcagaatacgcgcctctttcagtaacgggcgaacaggttcggtcaccatacaataatcaatacgccatcctttattctttgcgcgggagttgaaacgataactccaccacgtatattcctgctgttcgggatgcaacaaacggaaagtatcgataaaaccggcattcagaaaacgcgtcatccattcccgttcttcgggtaaaaaaccactattagtagcgttacgaataggatcatgaatatctatcggttcatggcagatattataatctccgcaaagtataagtttcggacgtgattttcgcagctccgtcacgtactcctggaacttctccaaccacaccatcttaaatgcctggcgttcgtcaccactcgttcctgaaggatgataaacacttacgacagatatatcgccaaaatcggcacggataaaacggccttcattatcatattcttctattcccatgccatattccacatggtccggctcttttttagtcaagatggctactccgctataccccttcttctgcgcagaatagagataatgcttataccccaatgtactcaatgcttcttccggatattgatccggctgcaatttagtttcctgaatgcacaccacatcagcttgttcctgttccagccattccggcaaacctttactaacagctgcacgcagcccatttacattatatgtaataattttcatatgatcgtttatttttatcttatttattaagagttttctcccattccagaagtttcactttgcgttccaatccccaatgataacctcctaatccaccatccgtacgcaacacccggtgacagggtataagtaccgatacaggattatcgcccacagcggagccaacagcacgacaagcattcggcttttgcaatttctgtgcaatttttccgtatgaggtaataccacccaagggaatattcagcagctctttccatacactcagctgaaattccgttcctttcagatgtaatggcaacacatcaatattctctttatctatagacaggacagcattaaccgtcttttgctgaagttcatctctgtgctctctgtaggcagcatgcggaaagatatgcttcaattcatccaatacagcatcccggctttcagtaacaaaagccagataacagattcccttagaggtagaagccatcagtatttccccaaaaggggtttcagtaaaggagtaggcaatgttcagattgcgacctccattcccagattcttctgcactcatgggcagtactttcaaaaagcggctgttcaaacgttcctgtttcatgataattcagatattaataacataatatttaagacggttacgatacccgcaatagcgtaaagtacgaaactgctccatttactgttgacatactgccccattaccttacgcgaagatgtcaacccgacttgcaggaaaacggtaaaaggtaactgtatactcagcaccatttgcgaaatcaacagtcctttaaaaggatcgccgatgaagaatatcagcaacaaggcgatacccaatgaaaggatcacacccacctgcgagtgactatccttgatgtgataagattctccgaagataccggcaaagatagaacccgccgccatgccacttgtaatggtggatgaaatacctgccatcagcaaagccagagcaaagacaaccgcggcactgtttccaagcaaaggctccagcaaagacttcgcctgttgcagctcttcaacctgaataccactcttaaagaaagtagcagcagccagcaatatcatagcactattgatagcccatcccacaatcatagagaagagcgtatcaaacaactcatacttcaaaaccttacgaatagaactatcatcttgcttattatattcatggctctgaatcacctccgaatgcaggaataagttatgcggcatcaccactgctcccaacacgctcataataatcagcatgctccctttcggaaaagcaggtgtcacccatccttccacagccatcggccagtcaatcttcaccaggaacaactcataaataaaggataatccgataacggaaacaaaagcaatgatagaacgctctatcttcttatacgaattcgtaaaaagcatgatgacgacaaagacggttgtcaatacagctccccatataatagggatatcaaaaagcatttccaaggcaattgcacctcccaatatttcggcaagggaagtcgatatggatgccaacaccgcagtgcccaaaataggacgtgagacccactttggcgtatattttgtggctgcttcagataaacacaaacctgtaacaatgcccaagtgagccacattatgctgcaatacgatcaacatgatcgttgacaaagttaccacccaaagcagggaatacccgaattcggaacccgccgcaaagttggaagcccagtttcccggatcaataaaaccaactgtaacaagcaacccgggaccaatatatttaaaaacgtccagaccacctaaataacgcttgtggtctctgcgtttcaagtctttcagaatatttttcatcgttcgttctttaaatggcgtaaaattacgaaataataacaagcgagccacactttcagttcaaaaaagaagcccccggcattgtacaacaccgagggccaacctatatttttaaagtacagggatttagttagaatcccatttcatgtagcgcccggcacaactgatccggacaagaagtcgaacgccttccgcaacgtactccttccagacgggaaatcacatcatttaccgacattcctttcaccagacgggaaaaaccttgcaaatttccgttacaacctccccaaaacgcaatatccgttattatattattttctatttccaattcaatgtgagaactacatgtaccttgagtcttataagtatacttcattactcttcactaccctccggcttcatgttggtataaactgtttgcacatcatcaaactcttcgagacgttctatcatcttgtccaaagtttcacgttgctcgggagtcacctctttcgtatcgttcggaatataagtaaattcaccaccgacatcctcaaaaccacattcttccaaatgtttctggatagctgcatagctcttcggatcgccatagatagtgattgttccttcttcttcatcctcttcgaactcatcatctacatcgtagtcaatcaggtcaagaatgagttcttccatatctatgccgtctttcttcttgaaagtaaacatacacttatggtcgaacaggaaagctaatgatcccatagtacccaagtttccgccaaacttattgaatacggaacgtacatcggcaactgtacgggtagtattgtcagtcaacgtatctacgaatacagcaataccgtgaggaccgtatccttcataagtcattcctttgtaatcgctctgatccttacccattgcattcttgatagcacggtcaatgttatccttcggcatattctcacgcttacaagtagcgataaccgaacgcaaagtcggattattttccggttccgggccaccagcctttaccgcaatagcaatttgtttacccagtcttgtaaaggtctttgccatgtgaccccatcttttcaatttggcagcttttctatattcaaatgctcttcccattggaattatattttaatgtttaattattaattgtttaactatcaattagcgaagttttgcatccaacttatcttccagattcttcacgagtttcgacatgatcttatcgatcatcttatcgttcagtgtctggttttcatcctgcaacaagaagcttactgcatacgattttttaccggcttccagattcttaccttcgtaaacatcgaagagagatacatctttcagcaatttcttttctgtctcataagcaatcttctctatttcggcaaactgcaccttcttgtcaaccaacaaggcaaggtcacgcttcacagccggaaatttagaaatttccgcatagctgatctttacagaacggatggctttcatcagctctttccaattcaggtcagcgtaatatacttcattgtcaatgtcgaaagctttcagaatcttcttcgttacgatgccgaatgtagcaagacgctttccgcccttagtctgtacagacaaggcagcagcataaatatcatccgtcaggttacctacaaccagatttctcatattcaaccctaaacgtaggaaaatgttctctacgtaagccttcaactcatatacagaactttcttcatcagcatgcgcccatgaattggatacttttttacccgttacccacaacccgagatgataattctcagtataagctgccaatgacttttcggggttcttcttttcttcattgaaataatagcaatttccgaattcgaagaatttcaagtcggcattcttacggttagcattgtgagagatactttccaatccaccgaacaacaaagtctgacgcatggcattcaggtctgtactcaacggattcagtagcattaccaggtttttagaaggataagtttccataccttcataatagccggcacgtgtcagagagttattcagaatctcattgaaaccacaacctaccaactgttcagctaccagattctgcaatttgttagacttatcatgttcgcccttcgtagtcaagctagacttcagcgtagacggtatttctacattattatatccataaatacggaggatatcttcaataacatcacaatcgcgttgcacgtctacacgataagggggaaccgccaaagtcaatccttctgccgtctcattggttattttcatctccagactggtaacaatgctcttgattgtctccaccggaatcactttacctaccaatgagtgcaccttctcataagataactctacgatgaaatcctgagcaggagcagcacaaatatcctttacttcagaagaaacagtaccgccagccagttctttcaccattatggcagccaatttcaaacagtaaatagtgatattggggtcaatacctctttcaaagcggaaagaagcatctgtattcagtccatgacgacgagctgtcttacgaacccatgtcggatggaaataagcgctttcaatgaagacatctttggtagtttccgtagaaccggaatccagaccaccgaatacaccggcaatacacatcggtttttccgtgtcacaaatcatcaggtcacgatcagataatttacgttccacgccatccaacgtgacaaacggagtaccttccggcattgtcctcaccactacttcgccacctttaattttatctgcatcaaagcagtgcaatggttggccgaatgcatgaacaatgtaatttgtgatatccactacattattgataggacgcagtccgataatacggagtttattctgcaaccattccggactttcttttactgttacgcccttcaccgttacaccggcatagcgagggcaagcttcactgttttcaactgtaacattgatatccagatcatgattttcaacggcaaaagcatctacagacggtttcttcagagaagtcggtttgttattttgcaccagataagcatacaagtcacgggctaccccatagtgagaacaagcatcggcacgattcggagtgatatccacttccagcacatagtcgctcttgatattataataatctttggcaagagttcccggaactgcatcagccggcagcacgatgatacctgcatgatctgtaccaataccgatttcatcttcagcgcaaatcatcccattggactcaacaccacggagttttgattttttaatcgtaaaacattcatctccgtcatagagttttgcacccaaagtggccactaccactttctgaccggcagccacattcggtgcaccgcacacgatctgcacaggttctccctgtcccagattcacagtagtcacgtgcatgtggtctgaattcggatgaggaatgcatgtcaacacttcaccgattacgagaccttccagtcctcctttaatcgtttgcacttcttctacacttcccgtttccaagccaatagaagttaatgcagcggcaacttcttccggtgtcaaatcgaaatcgacatactccttcaaccaattataagagatattcatatcattaattttttattgtttccaaaagtgacccgcaaaattacaaagtttttttggatgacagggaattatccatcaagaaaataatgaaaacagccgaaactacatgataaaaagtaattccggctgcaatattaaaatgcttatgtaattttaccattaatttagaatggcaacggtccatccgatcctaccccaccaaacggattgtctgtttgaggggcaaactcagtcggaggcggcacactgccatcacttactgcattcattttagaaccaaaggttgctccaccaccttctgccggatgcggaatcaccatatcatcttccggattctggaaacgggtgtactgaccgataaaacgcaaacgaacatcacctaccgcaccgttacgatgcttggcaataataatttctgccataccgcgtaaatcggttccatcttgtgaggtataaatcttataatattcaggacggtgaataaaacacaccatatcggcatcctgctcaatggctcccgactcacgcaagtcacttaactgcggacgtttaccttcttcaccttcacgactttccacaccacgattcaactgtgacaaggcaataatcggaatattcagttctttcgccaatcccttcaacgaacgtgaaatcgtacttacctcttcctgacggctaccaaatgacattccgctcgcattcatcaactgaaggtagtcgataataataatccttactccatgttcgcgtaccaggcgtcgagcttttgtacgaagttcaaacactgacaatgaaggtgtatcatctacatacagcggagcatccaaaagatcacgcaacttataatccagctgttgccattcataatccgccaattgtccgctcttaattttctcactcggaatttcgcacgcattggagatcaaacgattcaccaactgtacgttactcatttcaagagagaacacagctaccggattacgataattcaccgcaatattctttgccatagaaagtacgaatgccgtctttcccatggccggacgggcagcaatgataataaggtcggatctctgccaaccggaagtcattttgtcaagtttggtaaaaccgctctccaaaccacttaaaccgtccgtacgggcagctgcaatctgaattaactgatacgcttcggcaataacaggattaatctgtgtataatccttcttcatgttctgctgggagatctcaaacaatcttccttcagcttcctgcatcaaatcatctacatccagagtttcatcgaaagctttactctgaacattgctggtaaatgtaatcaattcgcgagccaatgctttctgtgcaatgatgcgggcgtgatattcaatatgcgccgaagaggcaaccttactacttaactgagtaatataaaacggaccacccacttcctccaaatcaccgcgtttagcaagttgctcctttaccgtaaggatatccaccggtttctgattcacagccaagtcggtgatagcggaataaatcaactggtgccggtgctcataaaaagactccggacgaagaatttcacttactaacgaataagcgtctttctctatcatcaatgctcccaatacagcctcttccagttccggcgcttgcggctggatacgtccgtagtcatttacgggctgtatttttgccttactattgcttcggggagcttttctctgttctgccattttttaatactatgaattattaaagggatggcaaagataatgcttattaatcaaaatcatccctattctaccaaacaaaaaaagctgtcccaaagtcgattttgagacagcttcttcttcttttacacaaatattaaatatatattactttttccaaacataatatggaacaagtaagcacttcataatatttatcaaacgttttatcaatgtacaatgctccatatagtcagaaatataattttgaaatattccttcaccgaacgatgctctatatatttcatattgtagcatattttatccggtagtatttgttctacatatgccttgtccgcatcctcagcctgtcctaaaatcgtattttcatctacatattctatagatgcataatccgtaattcccgggcgaacagacaacaccctccgctgttcctcagtgtaaagttccacatatttacgaacctccggacgcgggcctaccagactcatatcacctttcagtacattgaataattgaggcagttcatctaatttatacttgcggataaaatacccgatacgggtaatccggggatctcgtccgcctacagttatcaaaccttgcttatcagctcctatacgcattgagcggaacttatagacataaaaatccgcccctccacgtcccacacgtaactgtttatagaaaccaccacctttactttccagacggatagcaatatacaggaaaaggaaaacaggagataagaatagaattcccagaaaggaaaataaaatatcaaaaaaacgaatcatcacctatcaacagtcactttaaggtatgcatcttttacagctttgattataaagtccagcttttcttcatccaactgtggataaatgggcaaggagatttcacctttaaaattctcataagcttgtggatagttctttatatcatatcccaatgagctgaagaaggaaagcatcggcatcgggataaaatgaacgttcacggcaacctcgcttttcgcgatttcatcaatcatacgatcacgctgttcctctgtgaaatctttgatacgcaatgcatagatatgatatgagctttctttttctccatcttcagaaggtggcaaaatagcccaatcacaatcagcaaatgctttagaataggtattgaatactcttttacgttctttcagtagttcaggatattcccgtatctgagccaaaccgatagcagcatttacgtcagccatatttattttcattcccagaccgactatgtcataacgccaaccgccggctttggatttggaaaaagcatctttggtttgacaattcaaactcatcatacgcaattctttgtagagttccgcattatcaaacggttcgggcaaattcaggcagatggctcctccttcggccgtcgtcacattctttacggcgtgaagagagaagatagcaatatccgtttcgcaccctgtacgctgattcttgctgtaataagctcccaaagaatgggccgcatcattcataacaagaatacgtcccaatttttcctgtaccaatgacgtcgcctgaaacaggttgcgtatttccggttcattaacgagtctcatgatacggtcgtaatcacaagggaagcccgcaatatctaccggaataatagccttggttcttggcgtaattgcttttcgaatagcatccacagagatattgaaatcctctccggaatctaccataacaggctttgcacctgcatgaaggactgctaatgccgtagcactatatgtatacgccggcacaattacttcatcttcagctgttactcccaaccagcgaagcatcataatggctcccgaagtccatgagtttacacaaagcacttcttttgcattagagaatacttttatttcttcttccaatgcttttactttaggaccggaagttatccaaccagaacgtaaggaatcaaccacctcattaatgaccgcctcgtcaatataaggaggtgaaaaaggaattttcatgattaatatataattagaataaacattattagtgataaatcatagccacctgatatataaataactatcaatcatatacttatagaattcagacataatcttttttatagagatgcccattccattaattatattaatgactaaaattctcataaatcgttccatgtccaggatataaatcatttccattggccaatgatattatacgctgtacagaagtactcgcctctattttattactataaggaaagctcgttataacttttaaaccaggaataaatgaatcccctgaaaaaatagactttcctattttatatgtcaaacaactcttatcatggcctgaagtctcataggtctccaattctatatttgggaaaagatgaactttatccctttcttttagaacttgcagatttgtattagtaaatacaattggatcattatgatatcgagaaaagtttttcttattagatgctaaagcttcttgcccaaaagaagaagtataaacaatacaatctggatatgcctttaccaactccctaatcccataaatatgatcataatgtgtatgagtaagaaaaacaccttttatcatggcatcttccttcagttgagatataataggattaaaatcccctatatcaatcaaaaaaacatttaatgagccagcttcagataatataaatgagtttgaattaaaaacagaattaacaatttgcctaatctccatttgacattatatctttatcaaatccggtattatcattgatttcgtttttaaccacatagttccccagcttaaacccaagccaaaagaagacattaataaagtcgtctctccagatagtaatcgttcacgaagtctcgtaaccatcaaggaaggtatagaagcacctcccaaattaccaaactcttccaagttataaggaaccttttcctgaggcagttttagcttcttaacgatacgatcaacaatcattttattagcttggtgaattaagaaataatcaatatccgtatcgcgattaatattataatctgccaaaaatttctctacagatttgggaggacgggatattgcgaatgagaaaacattcatcccatttatcagagtatggataggagcacgaacaataccattaccaaaatcctcgtattcaaaagattccggggtaaccggatgacgaaaaccaccgtggggagtcatcaatgcttcatatcccttaccataagtatgaaaatcaacaacaatatcattagccgcctcgtcatattctaaagctattgccgtaccacagtcaccaaacaatggtacgcggctcttgtccttcatcgaccccatacgtaacgccgtatcaccaataagtaacaaagcgcgctttacattaccagtcgtcaacaaattgcccgcaaccgttattgcatacatgcatccacagcatcccatagggatatccatacagaaacagttctccgacaacgccaatctgtcttgcaatatacaagaagtaggcggagtacgataatcacctgttacggattcaaacagcaaaacatcaatactatccctctcccatcccagttcttcaagtaacttctcagcggcagcttggcacatgtccgaagcacacatattatccggagcaatatggcgtcttcttatgccgactgtattatcaaatacttccgcctcttcctgagaaaaaaaatcaaaatcagatgtcttcaccacattctcaggaacagccatagacactcccttcatgccgacattcttaattttccatcttgccatagtgcaacccgttagagttcaacatcatactttttcaaaatttcacgccccctaccataggaagtgaactccataatatcttccggatcgaacatcacatcaaaagactcttccaacaaagcaatgatattcaactggtgaacagagtcccatgattctacgttttctttcgaaaaatcatcattcaatacagaactatccacaccaaacacttcaacaaaagcatcattgtatttttcaatattcgtcattacattctctatttttataaattcaacttactatataatatctttccggcttcattcttaggaatagcatctattattctcacctcaaaagccgacgctacaagtttggtcttttctaccaatatttcctttaccgcagtcacgtattgattattggtcagataaacaatcattttttcatccgtacccacacaggcacattctatcgggcatttacctttaattatctgttcacactcatccaatccgatacgcattccatacagttttaagaagcgccccatacgacctacaatgaaataacacccgtcttcatcccgataggcaagatcacccgtacgcataaaaccattacgctcatcacccaataataaatcctcacgtttacaagcataccccatcgttacatttttgccgcgataacacatctcaccctccgtgtttggcaattctattacagagccatcactgtctatcaatgacaattctgcattcggaaccgcacggcctatactgccacactttgaaatcgcatactccggtggaagataagccatacgggcagtaccctctgactgtccataagtggcaatccaacgtttcccgttatcacgacagtattctgcaaatttcaaattcaactgacgcggcatttttccgcctccttgagtaagcagtgtcaaatcaggcaagtccatacggaaaaagcgcatcagatttaagatctcaaaactataaggaacacctgtaaaactggtggcgtgctgttctttcataaagctccaaaaagctttgtcagtcatactttgattggttatcaatacagtagctccaacataaagatgactgaataccactgatagccccatagtataatataatggaagaacaagcaaagggcgatcattggaagtcaggccaaagaaagtagagatatttaaggccgccgcttctatattaccatatttatgccgtaccaacttgggactacccgttgagccggaagtaggtaaaagatgagatagatcaggatgcatcgcacaatctcccattcctgtacgcaagaggatatagccataatattcacacaccatttcataatgcagatcaactgccatcaacgagggcacacaaacataagaagggcggtaaatatcaagtagattatgaagaagttccttttcaatatgtgcattcaatattaaagggacattgccggaattgatacaacctatactccaagctatacctccgacattattttctgtcaataagaataataaggaacgactgggaagaatagtagatatgctctcggaaaaatccaacaactcaccatacttcaaggtatcccccaaagcatcaactgcagcaaacgcatcctgcgcctgcttatttaaattcaatatcatttggtttattttattctaaatggaagcacagccatcaactcccaatatctgacctgaaatataagaagaacggtctgaagcaagaaaagcacaagcattagcaacatcttcaggagctcccaagcgtcctaaagcaatcttttgaatacgagtatcgattttttcgccactttcctcataaagctctgaaaagcgttccgttttgacaatacccggtgcaacagcattcacacgaatccccagaggggccaattctttagctgcagatttagtaaaagccatgattgctcctttggttgcagagtaagcagattgccccggtgaacctagtactgccgttaccgatgctatgtttacaatagagccgctgtgattgcgggccatcaaacgagaaaccagctgaatcatttcaattacagctattacattcacacgaaacatcagttctgtttccggacgcaatatcataccgattttcttattaaataccacacccgcattgttaatcagtgcatcaatacgcccttcttgtttgaatacggacataaaggctgattttacagctgtagcatccgtcacatcaaaatataaaggaagcacgcgggtattattatcttctgagcaagccttcgcccattcatccataactccttcagcacggtcgcaagcataaactattgcaccatcagaagcaaaacgttcagctatagatttaccgataccttgtgcggcaccggtaactatacataccttattatataaaaacctctccatacaaattatttcagactacgcccaccatcaattaccaagttagtaccagtaacccatgcagaagcattggaaagcaaataaattatggcaaacgcaatctcctctggtttaccataacgctttaatggatacaagctcatgtctttagatttatcctcttctgaatacacttgcttatcaattagtggagtatttaccatcccgggacttactgcattacaacgaattccttttgcagccagttccacagcagcatacttaacaaaagcagatagagatgttttagcgctaccatatatagcattgcctggcaaaatattaaaatttccagctatagataaagtaaatactaaactagaaggattagatagttttttctttcttaccaattccttagtcaatagcataggagcaaaactatttaaacaataaattcggtccaattcatcccacgagataaacggtataggcaatgtctttcctataccagcattatttacacaaccatccaattgaggcaatttagtcaccaaagctgaaataccatcggctgaacttaaatctgcagtaaatatctgatgcacttgcccctcagtttctaacgaattgtaggtttcaagaagtctttcttcattcctgccagtgagcaccaatgtagcccccattcgtgaacattcaatagcagtagcctgtccgatgccggatgaagcccccgtcactaaaattgttttcccaaataaactataagggttatacatcttacattttttgttgaatggcacgatataaatcttccaacgtattggcatctctgatgtcatcagtatccaatgtaacatcataaacttcatccaccattgctatcaaagataaggccaatatagaggtccattcttctaattccttaaatacagtatctgatgtaatcaaagatttatcagtatcatccaacaattcaaaaaagcaatttacaaatttttccataactctatttttttaatatttttttcatcaaaaccctttcccgcccatctggcaatacaatagtctgctctatttccgccttttgcgccttatggaaagccaacacttccttattatccgtatcaacttctatatatttatattttactcctaacgcagcaaaaacagcattagccttaagacttaaagcaaccgcatccaatgaatttttatctcccggtttccaagcccaaaagtcccctcgggcgccttccttatatacaaattggtagttactctccttagttgtagatttatatcgttgaattaacggcctgatcaatcgaggattgcatataatagaacctaaagcagccaaacctaacgacaacttatgtcgacgcaaagtgttcatctgccaatttgcatccaacgtgccactattaaaacccacaatttctctcttctcattttctgcacaaataattatttcatacggatcatccagaatcacccgataatattgtttcaaaaaggaaaatcccatttgagaaaatattcccaaaggatgtttatgcctcacagaatagtgtatttgggctatttgtttggcatcagaaaccttagctattctatataatatcatacttctttttctaagactttattatatacatcaacaatctgtctagctattatattcggtgaaaattttgaaatgcaacgatttgaaatagcttttgaattataatttgaaacattattacgcatttctatcatagaactagtcaatgcatcaacatcttctgtcggaattaagatcccatcctctgatgttataaaattttcagggccaccacatattgtagcaataacaggcaaaccacaagcaagcgcttctataaaaactactccaaatgtttcaaaacgagaaggttgcacatatacactcgattcattaaataaagctttcatttcctctctactaatttttccaataaattgtactctgttttccaactgtaattcggtaactagtgaaaataaagaatcatattccggtccatcacctctaattatcaaagatacttctgaagagaaatttgcatttttaaaagctttaatcaataaatcaaacccttttctttttatcaatgtgccaacactcaaaaatataaatttaccagaatctactttagaattttctacataattataatattccgtatctacaatattgttgataacaagactttcgtatccagctttttctaatattgcctgtttcaatgcctcagatactgatatcaatgaatttattcgtggataatatttcttggctaaccgcaaggcttcgcgtggaagtttcttcgcattccaaacactccagtgttctgttacaacaacagggatattatatttatgccctatcttcactgcaatcggtatagaaaacaaataatgagcatgtattatgtctggtaatccacattctttttttattcgttcaaacaaaaaactgccagctaaagaagctacaaacgatgtaaaacttaaccctatattgataggtaacggtgcaacaaacattctatagacacaaatatcatctacaaaattttttgttattcctatttttctttttaaaggagcatgaaatcggcgatcaatacataacacaacaactttatgccctaatttaaccaacgcttttgcttgatccgattcaaaaataccatatataggatctccctcgcatggatatcctcttgaaataattaaaatattcatttccttattatatatttatttatattattcaactaagcaaaagagaaaagaaccagactccacactaatgaaaagctccatatcgttaataatatccatttgtactaatttaataaaggtttcaattttgtgttttcaaataacttctcttgcctccccaaattgataaatcacaaaaaagaagtagaaacaaaaaaacgaaaattgcaggagaaacaaatacccattgaaatccaactctagttatagaataaaataaataagtcactatcatcaacgaaaataaactttttttccgatataacctttttattgctactctagtcatcattccatatagaaatgagaacaagaacacgccccatacacccaaatcataataaaatatcatcgcattagtgtaagcaaagttaaactctattggaccatcatgagaactatttccaatagtaattatattagcttgttgtaccttaactgttttatcataaactgtttttatttcataacctatttgagtagtaaacatcgagataaaaccttccaagcccataaaagtagctcttccatattgataacctccaatgtttttcaaatagttacgctccattgcataatcaaaagctctaaaaggtcctatatgataaaccaatatatctttatttaaatcacgcgctccctcttctatcgcattaatagttaattccgttgcttctccaccccttgttatattacgaagataagataaataagatgccgtaacatacacaaatataaatgcaatagagagtaatgctattttttttgtagttaacatcttagaattcttatgtcttacgcctaaaaagaatgagaataaatataagatacctatataaacaacgattatcattatgcttcccctactcccgccaattaatgattttataactacaggaatagcgtaaattacaatatatttccattcttttttatacaaaaatgaatacgttagtaaaaaaacaaaaatgatattgaaagctggtaggactagcctgtagacagaagacagaagtcccttatcctcaaacaataaatcaatatttcttgccacatcagaaactgtataaatcagaattacttctttgtactgataaaaaacatataacatcagcaatatgtaacagcaacaaaaaatcaaccacaatttatttttctgtattttatctattgtttcccaacacttaacaccaatcgcagaaaggccttcattgtttatacgcggataaactaccaaaaaacctataagaaaagataatgtatgtaatataaatatcgcatatgttctacttgagacctcatataaaccaaatggattgaaatatgagaatgccaagcaaatcaaccagtaagaaagatgagtaaatataataaattttgatattctatctcttacggtcaaattagcgattaataatgacaataaatatgtgactatgacaaaaataaaaaacattttattgcgtcaataagtttctatgatttctccttatctcagaaagatgatacagccaattaaagataccagtcggaagaataaaggaaatactaagtttaattcgttctacaaatgattcagatagatcaaatccctccattagcaatctccatttttgttttaaagacatatcacattgttgcatatacttaagcagagaatttacagccttttcccttaaataaatatcagatgtatgttgacgatataatggcaaatatatatcgtaagccacttttcgcttctgttttaaagtaatgcaccctgccattccaccattatgccatctataaacagccataaagtcatttagagaaagccctttcccatacttcaacaaataataataaagatacacatctctaccattaaatccatcgcgacataatgcctcataagtttttaaatataactctcttctaaataaggaagtacaatattgtgtaacccaaaccttcaagaacaagacattatctatggataggttattgtttttctcataataatcatatccatattcctttcggaagaccatctcattctcatcatagattttatatctatggcaacaaaatacataatctaaattttgttctagaaaatcaacttgcttttgtagttttaaagggtcaatccaatagtcatctccctcacacatagcaatatattttccatgcatatgttcattcattatttttgcaagggagccattttttttcgaatactgattctctgtctcgtaaataggctttattatattcggatatttttctgcgtattcttgaatgatagcagctgtaccatccgtagaagcatcatcatgtactatagcctcaaagtggaaattcgctttctgcatcacaaatccctcaaggcactgacggatataaggttcatggttgtatgcagtacagcatatagttaccatcaaatcctcactattatttatttctattggcatatactatttgtttcttttatcaatttagaattttccaatatatcatgagccatttttgtaatgaaaagttccacatgtttattatcttacagaatatcctccatcaacaattatattctgtcccgtaacccatctggcaccattactaagtaagtaaatgcatgcatttgaaatatccgtagtctcacctaatccaagtaaatgcttattttctaattctttccgtcgttcaggatctactatatggcgagcatttttattaatatttgtaacaattacaccgggagagatacaatttacgcgaatatttttaggagccaattcaacagcaagacttcgtacacctgcaatgattgcaccttttgaaaaactatataacgatttgcaactctcacctaccactcccataatagaagataggaagattatgcttattccattactcttatcataacatccaacatgtgtaacttcacgaactaactgaattgcagaaaaaacatttgttcgcataatgttatcaatatcttcttccttaacaagcttaagtggcaacactgaagatattccagcacaatgcacaacaccgctaatcttgccaacttcatttaccgcaagtttaattatacatgacaatgctctaaaatctgttacatctacactataatatgcatgtccactaccctccattttagataatgtttgctttagacattcaatatttcttgcaatcaatatgactttagcacccatacgactaaaatcaatagcacactgggcaccaataccacttgacgcacctgttaccaaaattattttattctctaacgaaaaaggattcatcatacttctactatatcactgattttacaatccacaaaaggtactattgctgttgcccacgtcattccaacgccaaatgcacttaaaagaagtatattattgcctttcaatttgtcttgaagttcactaacaatagtcaaaggaactgatacagacgatgtatttccatattttgatattgtagatggcattttagagacatcaagcttcatcttctttgcaatatatgaattaataaaattgtttgcctgatgaaatacaatgaaatccatcatatctgctgttttaccagcatattccaaagtttttttaatatctcgtggaatctcacgtattacaaaattgaatacatctccccccttcatatagccctgttcgtcagaacggatattaccatattcatccacaaccttctccttcagtgtctcaacagaactcatgtttctataaccacctccaggaaccattatcaaatcagcacaagacccatctgaattcagagaaaaataactttcgccaaatttttcatcacgctcaacaagagcagcaattcctccatcgccaaagataaatgcacttctacgatctttgggagaataaacttttgaacgagtctccccatcaagtattaatgccttacgaacattacccgtctgcataattccatatactacagaaagtccataacaaaaagcagaacaccccaatgtcatatcaaaagctatacaatagttagataatcctagtctatcttgcaaaatgattgaagttgcaggcatacgataatctggtgtctgagatatgaatataagcaagtcaatctcactacgatcgatattattgtcattaagaagtttttcagcagcagcgaaacacagatcagaagagcatgtcttgtcatctacaaaacggcgttcaaatatacccactttatcaacgatctcctttacttgttctgctggaaagtactgagtatattcataattattgattactgtatgaggaacagcagcagccatagctgtcactcctacaccactatatttaaggaatgccatttttctatttatttagccatagccaacaaataaagatcatttattgttgtgcaaactttaatatctctatctcctatttccctctcaaactcttcatcataaaatgcaatgagaagcataactgacaatgaactccattcgctaagctcacggaattttgtttctactgttaaaaccgaagaatcttcaacttcaattgtctcagcaaacttttctataaaatctttaatttccatttttttgtttctaataatccattttttttgcaggtattcccattactgttgtaccttcttttactgttaatatcaccacacttcctgcaccgactactgcattatctttaaccttcttatggggcaatatttgggcaccaggatgaacggtacataaacgacctatttcactaaaaccaccaaaaaatgtaaatgctcccaaatgactccagtcattgaccttacaatcatgacctaatactgcatttctcattattgttacaaatttacctacatacacatcgcaacttaataaaacatttgcagtgataatacatccaggaccaaaagttgtattcatacttactttagctgttggatgtataaggctaacaaaactggcacctttatctgacattaagtcaacataatattttttccattttacatcccccaatgcacaaacaaagacatcatctttatctattacataatcttcgggcgaacatagaattggcggataccccttataaccgtccaatgcatcagatttactgtctaaataccctttgcaactccattctctatcatccttatagcaatcaagaaagagattataaacttcacggccaaatcctcttgctccaataattattaaattattcatcgtatgcttctgtaatactatgataattacatttacctgataatacaatcaaaattctatctatatcatcttcacttaatcctgcatacatcggtaaacatatcacactatttgctattttatgtgctactggaagattatccagtcttgcagaatccagccccctgtaagtagagaactcgcttattaaaggatagaaataccgacgaccaaacacattctgttctttcattttaaaatataattcatcacgagtcatgccatatttctcagcatccacgaatatcgggaaataggaataattatggcgaactcccggtatatcttccatgacatgaaggccattaacgtttcgtaacaccttccggtatttaattgcaatctgatgacgggcttctatagcagtatctacctgcttcagattcaataaaccataagcggaacggatttcatctattttaccattgataccgggagcaactatttccgtctctccggcaaaaccaaagttcttcaaatagtcaatacgtttctttgttttctcatcatgacaaaccagagcaccaccttcaatcgtattataaacttttgtggcatgaaaacttaatgtggaaatatctcccgcattcagaatggattctccattcacctttaccccaaaagcatgggcagcatcatagataactttcaaaccatatttatcggctatcgcctgaatacgatctgtatcacaaggcttaccataaacatgtacaggcatgatagccgtagtgcgaggtgtaatagcgtcttctatcttttccggatcgatattacaggtttccggatcaatatctacaaacacaggcttgataccattccaccacaaggaatgggtagtggccacaaaactgtagggagttgtaatcacctcgccagtgatacgaagtgcctgcaacgcgcacaacaaaggtaaggtgccattagtaaaaagactaatataaggtacctttaaatattcgcacaaagctttctccaattcctgatggtagtaaccattgttggttaaccacttgcgactccaaatgtcctgcaaatagggcataaattcgtcaagagaaggaagtaatggagaggtaactgtaattactttattttccattcttaaatagtatttatttttgtttcagtagagaaactgcaagttgcttaagttcaatatactctggtaattttactttttcatagataaaagctatcagtaaaattcccaagaacagctgaagcgggagaagaagataaaccgaccaatccaataaagaaatacaccacataaaaaaagctacgataaaggatgtaagaaaagtaggcaatatatctttcaattgatccatagtaggataatctattaatcttgccgaataatagctatttaaaaagtaagcaataaaagaggtaaaaacactcccccaaagcatgtactcaataccacaatatattcctactacaatcggtcctactgctataaacttcttaatcatttccaactttagaaacaaatcggaacgtccttttacttgtaaaatgttcaaattaatcgcatgaagaggatataacataccagcaaaacagattatctgtaaaaagtaaacagcaggaagccactttacacctatcaaaataagaatcaaaggttttgctacggccgcaagccctaacatacaagcgaaacttattaacatagttgtccttatgacctttcggtaagcttcacgtaatcgttccggttcttcctgaatagagcttagaacaggataactaacacgttgaacaacagtagtcaaattagtggaaaatattgtattaaattgttctgcacgcgtatattgccctaatagagaggaagcataaaaacgaccaataattatataataaatattctgatagatagtatttataagtccagacaacaataatttggagccaaaaccaaaaagctcattaaaactcttcaatgaaaattctaaattaggatgccatttacaaaacatccataaaaatgaagtatttaataattgccgagataactgttgaccaaccaaactccacactcccattccagcaagagccatacttataccaacaaatccactacctatggatgaaattaatgagactttagtttgtgttttgaaattgatattccgtacaaataccgtacgaggaataattgataaagcattaataataagaattaaacctattattcgcataatatttatcaatattggttcctttaaaaaaatactaatagcaggtgatgcaacaaacaaagaaatgtataaaaaaacactaacaactatattaaaataaaaaactgtattatagtcaatacgtttaatatgcactttacgtattagagcattagaaaaaccactatcaataatagaatttgatacagctataaatacagcgatcatggccataaccccatattcttcaggagtcagcaaacgtgctaaaattagacctacaagaaaagtaataccagaactagctatattatctataaagctccatccaacaccacgaacagctttatcttttaaagaatcttgcatacgataattattctccaccccaaaatagtgtcaagacatcattctaagtatcacaaaaaaatatgttacacttcaaattactaaataatagaaagactaggggaaagaaacactaagttgatttatattaattataggaatcttcgcatagatctacattaagaaatagtgttatcttccaaccctagtcaccattttatttacttatttcaccttctttcaattccacttcattactcccttttttagtcttcaaatttatatagaaatctcttccaaacaatatccaactaacacagcataatccagtaaggaatacaatgccaagaagcataagagtcttgcgaggttttgaagcttttataggaatagttgctggttcaattatcgtatatacaggtgtaatttcctgaacttttgcttctgccatttgcaattgttgcgctacagatgtataaacctgatacgccaaacgcatttcattttccaaacgttcttgctcagcacgataactcaacaaaataatattcttgttagcatccgcaaacttggcatagttctcctgtgctttctcatattctttcttttttctttcgaaaagtttctcttgaaactgaaagtcctgacgagctttagttgttcgatattctgtgatatagtcttgtaaccgacgtaccacagtatcagtaagacaagcagaaatacgggcatcctgcattgttacagacaaagtagtaactccagtcttcttatcaacagaaacagtgatgcgttcacttaactcttttgcaatatccgcttcctcttttgttaaatgaaaaggatcaagaatagcatcttctttttcctcctctgtaaataatgaaataacccagcctagtgccttaaatggagcagaagttatcaacgtccaccacggaacacgctgatgttcattcaaataacaataaagtgtagtatcaacctcttcgtccaaatccttaacttgaacattaaacagccccgttataaaaggagtagaagtaacaatatcaggatacaaatcaggatatattgcatcagcagtagatgtagcgttaaggttaaaacctgccattgcagccaatgacgaaagcccacctgtagttttattatcagacaattcaggtgcaatcatagcattcgccgtatactcccggggaatactaaatgcgattaccaagcctattagtacggcatatccacaagcctttagtacaaacttacgttccccccagacctttaatgcaagctccagtaaatctatttcttcttgagaagaaaagtttttttgaagttcttcattcataattcattcttatttaaaagcgtttaccaaagtggccaccatagcagccattgtagcggtagtggaacttacacccaatatttctgcaagcttcatatgttgcttctccgccttactaggtactacaatttcacaacccggctgtatgagttgactatcaccgcgtttagcccgtgccactgtaccattcagataaataatataagccttcttcttcttcgccatattaccatagcctcctgccatattgatataatgcttcagcttcgcacctttctcccaagccaccgtattgggatacataaccgaaccgctaatcttaacagtattgacaaactcaggaatatagatcacatcaccttcacgcaaaacaacatcatagtcgctacccggattagccaaagccttctccatatctataccgacggtatatgtttccgttatagccaatttagcaacagatatactgtctttgccctcaccattacgtgccatacgcagagcatccctttcacggcgacgctcttcatcattcattctgcgaataagacgaccgccttttatgtaagcatccggagttataccacccgcacgttttattaaatcactcaaacgctcgttctttttcaaaagcgcataacttccactaaacaacacttctcccgatactgaaactgtacgctgcaccttataggccggactcctgcggacctgaaccatatcaaacggctgcaaatagaaatccgcatcccctatcaccaagccgtcttttatatcaaaagcaaatgtttccgccaatttactactgtaagcagtactcttagggtttttaatacggcgcgtcacactcactcgcgtagtagccgctgcctcacgcaaaccgccagcctgaacaaccagatcttctatagtcatcttgtccgaatacaggaaggttcccggatttagaacttcaccatatattgatacggtctcttcctccttcagatcattcacactggggatataaagatggtcatccttttgcaagggaatatctgcaacggtaccattgagtaaaccgttcaaatcaatagctataatttcatgagaaagatcctcatgttcacgatccaataatacacgattcaaaaaggcatcgccacgaagcccttcagctttctttatcaactgttttaccgtgtttacctctccatccaactgatagagtcccgaacggtaaacagcaccgcttatctcaactttgttttcaaaacggtcgagtacggcatcaacggttacaagatcaccgtcgtccagacggaatacggaataatccatttcatctacattgaaaacctgatgctcacgtccgctcttacggataagacgaatggctttcttgtaggaatctccagtaaaaccaccggcatattccagcaaattagcgacagtttccgtaggcttcatttcataatacattggacgcttaacctttccaacgatctccaccagagattcataaggattcacaatgataacgtcgccttcttgcaagcgtatatcgtcattcatcttacccttcatgataaactcatagacatcaagattttctatagtctttccgttacgcaccaactttatgccacgcaaactaccgattttattaacaccacccgcacggtacaatgcatgaaaaacagtagaaaaagcagaaagagaataagtacccggaacggaaacctctcccatgatgtttacctgaatagtacgcgtgtcgccaagcgttaaccgaatctgagagttaggctcattgccaccgatacccgaataaatcttagaaaattcacgttgcagatattggttggcttccttcaccgtcattccattcaagtgaaccggtcccaaatccttaacctgaatatcaccttcaggactaatcgtctggcggattgtattttccgaagcaccccaaatatctataatcacttcatcaccgggacccaaacgataacttatcggagtggcaagattagcgctgggttcaaagcttaaattggtatttctgaataaattatggccgaaaatctgcctggcagacatttccagatgagctttgctgtcctgcttttcatcaatgacagccttctggtcttccaactctgcagcttcataagatgaatccaaagccacggcgtgtttgcgcatctggttgggcttattacctgtaccttcagcagtactgttggtagcctcatacctggacttaatccgcaatacctgctcctgggtcacaccacggcgaagcagttcagtagtcatttgcttctgggattttcctgctgcttgtgcattctttacatactcaacaacctgttcatcagacatgcgttgggcatgaacaaaaccggataaagtaaaaagacaaaagataaataataataatcgacgcatagtttatatataaagataattattcttcatgatgattttctcattcatcaatatattcccaaggataaggattatccactacattctggaactcggcgatagcttcctgttgatcgggagtaagtgctgcggaatcccaggaagcaatgatggtacgagcttcatcagccaagggatcgtcaaaaacctcaccatagcaggcagttagtaaacgaagttttaataaagaagcaggaagtgaatcgaggatattccagcaacggtttaaaacttcctgaacatgtatttgcttttcaccatgatcgacaaatgaagcgttgtagcccatcagaagagccagacaaacatttgcctgttcttccacagtagaacctttgacaccggaattatacaaagccgtggtcaggcggtaaacttcaccgttacggcgggacaagtcatcgctatagaccggactcccgtccatgcccaaatacatcagctcgtgcgctgcacgctgaagagaaactatttcttcggaaagagtcataaagaattatgattttggagttatcaactgtcaattacctctataagatcaggatggatagtagccatggcaacggctatgacaccttgtatcgcaacaactacacgacgatcgcgagcaccttttactttcaggaaaataccttcctgaccctcgaagtcacctcccgtgatacgaacttttgtacctttagatagattcagttcatcaggttgaaaatacatgagatgatcattgtaagtaccggctacagcaataaaacgctgcatctcgctatctgagataataatcttctgaccactacgggtatcggttatgtattgtaaataggttacttgtgatttgatacgcttcacctcggaaggacaagcatgaacaaaaagtaaattatgaatgacaggaaccagaacacgcactttcttacctttctttatactgatcttgtattgcatgggaacgaaacaacccaatttttccttttcaagcagacgcatagcatcaggctctctacgataagtggcacgcatagcataccatattggggtttctttctccacttccattctatgattatttcagaaaagtgcgttcctccggggctttgaacttcttgcatacacttgaaattcaatcacttgcgagcactttatgtaaaatacaacaagctttgtgctcctcttgtcaacgagttttctacagcaatccaatgctttataggtaaaaagctataaacgagcagattacagtcaaaaagtattttttaatcgttcgtttaatgggcgtcaatattttttaaaagcggaagatagaaaaagaataaaatgagtaaatattaacagatatttttagctctcgtttgtttcttataatcagatagttagctttgtttttatccaatttaaagaagattttttatcaaacattttgtcattcggaaaaacacctttatctttgcgcccattaaacgaacgttttttgaacactttccaaattaaaacttatatatctagtatacaattatttactactcataaaagattatatttactgtatttccccctactctattatccctctaattttaatttcctatttttgtaacatttttaactgtgaatatcagttaaatcaataattaaaaattatacaatatggaaaaattaaaaaaaagaggttcaaaatgaatctaacgtaaagaaaacatctcatcaagttgaaaatcagagtacaaacagtaccagaacagtaagtaaaatcagtatagttgatgaggatttattggctgaacggtattatgcaggtataaaaactcatctgtgtgtaggagctctaagaagcttcaaattaggctattttaaaggtcaaaatattaataacataagcgatttaggaatgcatttgtacaaatcgggcgacgccataaaacacgaaaaagggcaagataacttaatggaaataagcagctttatgacagaactaagaaagatgtgggcagtaatacaaaaggaagataccgaacacatagatccgtatggttatgatgtaacaataaatcattgatagtttactacaaagaaagggcataactttgccccgtcaatctgattgtggaagggctacaccctttcactcggatggtgtagccctaacctaaaaagggtatagctatccggagcaaagggtgtagccatcgcagaggattgattactaatcatttataaactactaaattcattaaaatgaagaaacaaacgttggggcaccaatcgaatcatgtaacgaaaagcgaaagagtagaaaatctatggaagaaacttatcagacaagaaacagatctatcagatgaaaccatcacatggatgacaagacgaattagactactgactgagtatatggcatacggatgtgcactaatagcctatcgcaagcagaatggagatttttacatggcaagagccacactcgtatattatgaagcctgtttccaccgaaaatacgacattgaacgtatccagaaccatgtggtatactgggatatagaacagcagggatggagaacattccagatagagaattttctggagtggaaaccggtggttaattgagagtggagaatttaaaaatcaggagattatggaatcatatctattacatgacgccaatgcaagcagtaattttaaaataatgatgatgatacagaaagaaggaatgaaaggatacggtatctactggatgatactggagtttcttagagtacagaacggatataaggcagacgtaagaatactgcccgtactggcaagaaaaatgagagtgacagtagcaaccttaaagagaatcatcttcgattcaggactatttgaggtgaacgacacaaccttttcatcgcccggactcacacggcgcatggggccactggaagccaagcgcgaagcgaacagagaatcgggcagacgtggaggactggctaaccaacagagaatcagggaaggcctggcaagcgacgctttacctatcaatcagactaatgatataaataactccccctctatatctccccaaaggaagacaggaaagaatgaggagattcttcttattccaccggagtatgcactcaacaaaaatacacataattatgaaggactgatggaagagttgcaacgccaaaaagtaacggtcatcaaggaaatcaatgccatcctcagactcacggatttcggaaagctgaaaggaaggatatggaaaatactctatgacatcaacaactcaccgcagatgaaagcaaggatcgtgatgccgggaaaatatattctgaagctactgcaaaactaaaagaactaaagagggtgtttacacttcttccaccacagattacacggattctcacagaatatctatactggataacaattgtttatttgaatctggataaatctgtggtgctttcttctttccactctaaacaaattcgtatatttgctacacaaaaaccgttttaaatatcatgataacatttccgaatgccaaaataaacctgggactgaacattgtagagaagcgtcccgacgggtatcataatctggaaacagtattctatcctgttcccctagaagacgcgctagaagtgaatattctgcacgaaggcaatgagaagtttcgattgcaccaggcagaattaaaaatcgaaggagaagttgaaaataacttagtggtgaaagcctataagctgttggatgaaaagttcaatctgccgcccgtggatattcacctgttcaagcatattccttccggtgccggtttaggcggcggatcatctgacgcagcttatatgctgaaattattgaatgaaaaattcaatctggcactcacggatgagaccttagaagaatatgccgcaaaattgggagcagattgcgcctttttcattcggaatgccccaacatacgctgaaggaataggaaacctcttctcccctatctctttatccctaaaagggtatcagattgttttagttaaaccggatatttttgtttccacccgggaagcttttgctcaaataaaaccgcatcggcaggaaatgccactaaaagagatagtgaaacgtcctgtagaaaaatggaaagaatggatgatgaatgatttcgaggaaagtgtattcccccagttcccagctatcagggaaattaaggaagacctgtataaacaaggagctatttatgcctccatgacaggttccggttcgtctgtttttggattgttcgaaccaagtgccatattacccagcaatacttttggagagaagacatttatataccgcggaatattaaaataacgaccttgattaaaactatactggagaggctaaattcagcctctttttttatgccattttccagaagctgcaactgaacctttatcagaccctgatatttttttgttcactggtgaacaaaaaaataagccctgtctcccgacaaggcttattcacaacacaaacacaaaataaaacacgacaaaactactatgcaatcttacctgtctatgccggggaggcataagtactagttacggatattcacatatacataaacagcgtcaggctgatttgcaacatataaacaaatgcggggaagcatttgttcatgtcctatttgttaataaaaacaaaaatcgcttttaatgcttattgaatacctctttcgcgaagcttcaactgccagttccaagcagagagcaacgtatcttcgatagtttcaacagctgtccaacccaactcttcatttgcgaatttaggatcggcccataccttttcaatatctcccgcacgacgaccaacaatctgataattcagcttcacgccggttgccttttcgaaagcattaattaattccaatactgaaagaccgcgtcctgttccaatgttgaacacttccactttctctttttgtttattttccaagatgcggcggatagcaatcacatgtgcttttgctaaatcgactacattaatgaagtcgcgtatgcaagagccgtcgggcgtatcataatcatcaccgaacacactcagtttctcacggataccgatagcggtctgggtcagataaggtatcaagttttgaggcacaccattaggcaattcaccaagcaatgctgtaggatgcgcaccaatcggattgaaatagcgcagcaatattgcattgataggagcacctgaagccacagtatcacgaacaatctcttcattgatctgctttgtattaccataaggagattcagctttcttgatcggcgctttctccgtcaccggtaattcatccggttgaccatatacagtacaggaagacgagaatacgataccttccactccatgcttcggcatcagttcaagcaggtttatcaatgaaaccagattgttgcggtaataaagcaacggcttctgaaccgattcgcctacagccttactggctgcaaagtggatgatggctttaatgcctttatatttagtaaacacagcgtcaagaccggcgaaatccaaacaatccaacttctcgaatgccggacgaatacccgatactttttcgatgttatcaactacatcggcgctagagtttgacaaattatctattatcactacttcgaaacctgcgttctgaagttctactacagtgtgtgaaccaatatagccagttcctcctgtaaccaaaattctttccttcatcagtgatttattctattaggttatcatcgttgtgaccgcaaaattacgaaatttaatttagataaaataaaaaaagagtgttttttttagtctaaaaaagaaaggggtagaatttcttctacccctaacctattagttaatgttctatttttcagattttcacaacaccggagaaacccataaatgccatagccaaaagaccggcagtaatcagagcaatcggagttcccttcattcctttcgggatatttaccaaactcatctgttcgcgcaaacccgcaaaaagagtcagcgccaggccaaaaccgatagctgtggaaaatgcataaaccacaccggtcaacagatcataatctttctgaattacaaggatggcaacaccaagaatacaacagttagttgtgatcagaggcaaaaacacacccagtgcctgatataaagaaggcgatacttttttcaaaataatctctaccatctgaaccagtgcagcaatcaccagaataaaagtaatagtctgtaaataacccaggtcaaaagcatcgagcacaaatttctgaataaggaatgtcactatggttgcaatcgtaagcacaaatgccacggcagccgacatacccaatgcagtttccaccttcttggatacacctaaaaacggacagatacccaaaaactgcgacaatacgatgttattgacaaagattgccgaaataaatatcaatatatattccatactttccaaaattaagaattaaaaattaaaaactaaaagcaattactactctcatccttaatttctaattttccattattaattctttttcaagccgtttatcaatgcgatcagataccccagtgcaatgaaagctcccggtgcaagtacaaatatcaacataccgtattcttcaggaaggatagtcagatcaaatatcttaccggttcccagaaattcacgtacggcacccagcaaagtaagagccaaagtaaaaccaaggcccattcctaaaccatcaaagaaagaagctaccggagtgtttttggcagcaaaagcttctgcgcgtcccaatacaatacagtttaccacaatcagcggaatgaacaaacccagcgtagcatatagagcaggaacataagcttgcatgaccatttgcagtaaagttacaaaggaagcaatgaccacaatgaacgacggaatacgtaccatatcaggaattacattcttgatcgccgagattacgacattagaacaaatcagcacgaacatcgttgccagtcccatacccataccattgatagcggaagaggtggtacccagcgtaggacacataccaagcaggagtacaaacgtaggattctctttgataatcccgttcatcataactttaaaattattcatatcttctactcctttctttatttagcgctgatagagtccgcaacttcagtagcggcattttcagctggttcaacaactttttgcgtagcgcccgtagtggcatccgattcattctgaccggcataagctgcataagcagcattcacagcattcaggaaagctcgtgaagtaatggtagaagctgtaatggcatctacctggcctccatctttgcttacagacaacggagccttacccggattcatacctttgatacttcctttatttccttctttaaaccaatcggcagccttggaccccaatcccggagtttccacatgcgacaacagggaataatctataatgtttccttctgcatcaaaacctaccagtactctcagttcaccaccgaatcccattgcagtagcttccacagcagcaccgataaactgaccgccttgcgtagcaggataaacggcatattccacgtcattcaccatctgcatcttcttctctgcaatcggatcattatcgaaaccgggaactactgcactgacagcgtcgctcaatgtctttgcattggcttgtgctataggttctttcgtcaattcattcacatatgccagcaaagccacagagatggcagtaacgcccgtgagtaccagcaacatattcttcaaggatgattctaactttttcatttcttcttcgctacctccccaaagcgtttaggtttacaatatgtattaatcagcggagtgaaggcgttcataatcaaaatagcgaatgacataccttcgggataagcaccgaacagacggataatcactgtcagtaatccgatacatacaccataaatcagcatccccttcttgctcatcggagaagtgacgtagtcagtagccataaaaatagcacccagcatcaaaccacctgtaagcaactgaagcacgggagatacatacagttccggatctaccagatgcataatacccgagaacacaaatactgtagccaatatagaaataggaatatgccaggtaataattttcttccaaagcatataagctaatcccagcagtaacgccaatgcactgacttcacccagacaaccgccattgttaccaatcagcaaatcgaaagaggaaggcagatctttcagagcctctaaatttccaccggcaatctgcttcatcagattaagcggggtagcagccgtcgtagcatcggtgtaagaagtcaactgtcccaccaccggccaactcgtcatttgcacagggaaagaaagcaacaggaacacacggcctgccaatgcagggttgaagggattattacctaacccgccaaaagacatcttgcctacgcctatagcgaacaatgcacccagaataataatccagataggcagattggaaggtaaattgaatgccaacaacacacctgtaattacagcagaaccgtcacagattgttgtggtttctttcttcatcaggaatttaccaatagcccattcgaagaacaaacaggcagctaccgatgtagccgtgacaatcagcgcacccagtccgaagaaatagagcgatacaagaaatgcaggaatcaatgcaataagcacaccatacatattctttttcacgctgtcaccaccatggacgtggggtgaaagtgatattactaatttattttccatacttcgttattatttagcttgacgtgcacggatgatcgctcctaccttgcccttacccaagcggcagtagtccagcaacggacggttggcaggacaggtaaactgacaagaaccgcactcgatacaatccataattctttctttctccattctctcgaattctgcatgttcggcaagtgccgacagcaaataaggttccaatcccatcggacaagcacccacgcactttgcacaacggatgcaaggttgaatctcaccacgtttggcttccttttgattcattatcagaataccggaactacctttagcggtaggaacctccgtgttgaccaatgccttacccatcatcgggccaccaccaataatcttacctgtatcttcgggcagaccaccgcaagcatcaatcaattgcttcatcggcgtgccaatacgtgccagaaagttagacggttttgctactgacttaccagtaacggtaatcacgcgctcaaacaacggcttgtttttctgtacggcctgatataccgcaaatgcagtacctacattctgtaccacggctcctgtagaaattggtaaagcaccactcgctacctgacgactggtaatagcatctatcaactgcttttcacctccttgcggatattgcactttcaaggctactacctcgatacctgcatagctggatgccaccttcgccatcaactgaatagcatcgggcttattattctcaataccgataaatgccttgttcaccttcacagctttcatcagaatagatacacctaccataatttcctcggcatgttccagcatcagctgatggtcagctgtcagatagggttcacactccacagcattgataatcacacactctgctttgaatgcaggcggcggacagagtttcacctgagtagggaaacatgcaccacccaaacctacaataccggcattggctatcttttttactatttcctcggatgtaaggttacattccctcaccaacgtttcggtgcggtcaatactttcttcccattcatcaccgtccacatcaataaagatggcaggtttcggataaccactggcatcgataaccgtatcgattttagcaaccttgccgctgacagacgagtggatggccgcggatacgaaaccaccgggttcggcaatctttgtgccgactttcaccacatcccctttagctacaatcggttttgcaggcgcaccaatgtgctgccccagcaaaatcacagctttggcaggaatttccgcctttataatcggctgatgtgctgaaagtttattttcgtgtggatgaacaccaccgattgaaaatgtcttcaacatacaattctgtattttagtcgtttattacttctttattattaagcctctgcctttggagtttcaacctgagcaacaccttccgccttcggtttacgcggcgggaaattgagtgcgataatcgtgttctgaggacaagcctcttcgcacttacgacatgatttacatttgttcggatcgatgtaagccagattattttcaagtgtaatcgcttcgaacggacaaaccttcacgcacttgccacaaccaatacaagcaactgtacaagctttacgcgctatgccgcctttgtctttgtttacacactgcacataaatacggcgtgacttcttaccttgcggacgaatctcgataatgttcttcggacaagccttgacacaagctccacaagcagtacattttgcttcatccacttccggaagtcccgtttcaggattcatgtggatagcatcaaactgacaagcttccacacagtcaccacaccccagacatccgaaactacaaccggtttcgccaccataaagagaggccgcaatagcacaactcttcgcaccgtcgtacatattcgtacggggacggttggcgcaggttccattacatctcacaactgccaccatcggttcggcagcaacggcatccaaaccaaggattcccgcaatttgcgtcataacaggttgtccgcctaccggacagaacttgccctccagcgaacctgcctttacacaggcatcggcaaaaccgctacaacccggataaccacatccaccgcaatttgcttgaggcaacacctctcctacctgtgcaattcgcggatcttcatacacggcgaatttcttggaagctatgtataatatagcggccgaaaccagcgctatggctcccaatgaaatcactgcaatcagaattacattcataaattagttatttatttaattatttgttttaatgttccaagagttagtcaattggccttattgaaaaagaaaatttcttttccatacgtgttttatttagccacaatatataataataaggaataagaagagctaacgaacaaagtgcagagagaagttcgtcactccagatagccataaatacaaagagagaaatcaccagaatacagaaaggtattataaaggcccacaacaccgccatcattcccatagagagttcgccaaaaacgattacccggtcacccacctgataggaagacgcatcgccggtagttacatcgattattttttctttggtatcagccgaggcacaatgtcccttcgcactacatgccgcacaagctgacgtttggacaattctcacctttatatgagaactgtttatgttttccacaataccttgatgttttataatatctgccattttgcaaactgtgcattacaaattgcggcaaatttacgcattatttgtgaactgcaaggctttcacccgctttttttatgtgtacgccaacgtacttttccccgttttaactatttttcttcactttttccacagaacaagcaagaaaacctgttttataacacagactaaggtatcactttgcaccattgataagtataagataacaaaatgatactatgaattttcctcctaaaaacaagtaaggctgcttttctcctaaaagcagccttacttgttttacattatatcagctttacgtgattaccatttataattaataccgaagctcaataattcttttacctgaaaatagctatcacctgaagtaggcttgctactatcgtcaaaacgggcatgtatataaagtttggtcgacaaataacggttcaacacaaagttgaatgtattttcccattcaatacgcacccattcataacttgtcagatagtccaaacgagaatctaacgtaatggatggaatgatttgccagaacaaagtgggttgtacctgcgaaccaaaattatgacgcaccgtcttacccttctccaaaccaaagtccacttcattcacttccttattacccacataacgcatagtccacgtcaacggagctataaaaacagacaaattaaactttttcttcttcaacttatagtccataccgacactggcagaccaatctgccggagccagaaatgccgataccaaaggctctttattggctttatacccatgacagaactgtgtcttgaattccgtcgaaatcgtatagtaccaattagacgctgcctgaacacctaacttactgtatagacgaagctggtccgtgttgaccaaataatcatgaaattcatcagagggcgctgaagaaaatcctaatttggcatccaacaaactttcccattgaatcttttcacggtcattgtaattagcaaacagttgtaagttggccagtacagaattcgtactctcacctcctttataccagttatccgaaatataattctgagtaatctgcaaagaaccatttccgcctgttacccaccagttaggtttacggataaccacttccgcgtcttctttcacttccgccatgctttcctgagtgaataatttcatcacagaaggttttgaagatgcttctttttcaatattatccttgaatacctttacctgcataatattatcttcccatgccacaatcttatgcagatcatcattaacataaagatagagtaaagcacgatccactgtttcattcgcgcgttccttcgaggtgaagcgggcttcatcaaatggcaaaagttctttcactggcaattcaaccgtatcaaaaggctcaaatttccaattcaatgtcgaaacacgctttataggagaattataatatgtaaatggcttaagaaacagacggtagtaatcgggattatcaggaatgtaacgttcaggagtagacggatcattcaggtagtttaatactccaaaatacttctcatgcagtatggatactgtatccaacttgagagtatcattcgccggtttcaactttaagacaaaatattgcttcatcacatccgacaaggtatccacttgtgcggcagccggttcctctccggcctttaagacagtctttactgaattctgcgccactatcgacgaagaaaaaagcgcagcaactgcccataaagataagtatctattcttcataacgccctaaaatctatgttttgactgcaaaagtaatttaaaatgtttagaaaacatagaaaagagtaaagaaaagattagcaatagccggtacttaggataacaagttcatatcaactccgtaccagccccgtaccaagtccgtatcaagtccaaacatatatatacggagatgacacggaggtgatacggagatagtacggagataataaggacttagcatcactttttttttagaattgtttcgcagaaactttatgtacttcctcttttttttgtaattttgcgctttttaagtctcatctgtagacaggtaggtacgcaaatgtgtacatcgaccaaacaaaacaataatattaaaacagtatagctgtgggagaaacaaagtatattttcgtcaccggtggcgttgcctcatcattaggtaaaggcatcatcgcctcatccattggtaaattgctacaagcaagaggttacaaagtaaccattcagaagtttgacccgtatatcaatattgacccgggcactttaaacccctacgaacacggagaatgttatgtgactgtagacggacatgaagctgacctcgacttaggtcattacgaacgttttcttggcatccagactactaaagccaataacatcacaaccggacgtatctataaaagcgttatcgacaaagagcgccgtggtgattatttaggtaagaccattcaggttatccctcacatcacggacgaaattaaacgaaacgtgaagttgctgggtaacaaatataaattcgattttgtaattacagaaatcggtggtacggtgggtgatatcgaatcattgccgtatctggaaagtatccgtcagttgaagtgggaattgggacgtgacgctttgtgcgtgcaccttacttatgtaccttacctcacggcagccggtgaattgaaaaccaagccgacacaacactccgtaaaagaattgcagagtgccggtatacagccggatatattggtattgcgtacagaacacgaattgggcaccaacctgcgtaaaaaagtagcattattctgtaatgtggatgaaaacgcagtagtacagagcatcgatgctcctaccatctacgaagtgcctattctgatgcaggctcagaaactggatgaaacgatattgaagaaaatgggactgcccgtaggagacacaccgggactgggtccgtggcgtgctttcctcgaacgtcgccataaagcggaaaatacagaaccgctgcacattgcattagtcggcaaatatgacttgcaggatgcttacaaatccattcgcgaagccttgtcacaagctggtacatacaatgaccgtaaggtatccgtagactttgtgaacagtgaaaagctgacagaagaaaatgtagcggaagcactgaaaggcatggcaggtgtattgataggtccgggattcggtgaacgtggtatttccggtaagttcgtggctatcaaatacgcacgcacacatgatattccgactttcggtatttgcctgggaatgcagtgtatcgccattgaattcgcacgcaacgtgctgggatataccgatgcagattcacgtgaaatgaacgaaaagactccgcataatgtcatcgacattatggaagagcagaaatccatcacaaacatgggtggaacaatgcgtctgggagcctacgaatgtatcttgcagaaaggtagcaaggcttatgaagcttatggaacggaacacatccaggagcgccaccgccatcgctatgaattcaacaaccagtataaagcagagtacgaagctgccggcatgaaatgtgtaggtatcaatccggaatctgatttggtggaaatcgtagaaataccgaagttgaagtggtttgtcggaactcagttccatccggaatacagcagtacggtactgaatccccatccgttgttcgtggctttcatcaaagcatctgtcgaaagtttcgaggagaaggagaaagcaaagaaataagattatttcaataattataaaattgtaaattagaaattattcatggataaaaacaccattacaggtcttgttttaatagcaattttgttagtcggcttcagttttctgagtcgccccagtaaagagcaattggaagcacagcagcgttattatgattccattgcgctggtacagcaacgtgaagaagcgctgaaagccaaagcggatgcagcattggccaatgaaaaagatgtggaaactgtggattccacttcactcttcttcaatgcccgccaaggaacagattcgcttattacgattcagaacgacgtggctgagttgaccctcagcaccaaaggcggttccatattctccgctgtattgaaagagtatatggaacaggacaagaaaactcctgtaaccctattcaccggaaacgatgtttccatgaatttccttttctataataaaaaggaaacaatacagactaaggactattacttcaccactgtgaaccgtacggacagcaccgtaacaatgcgtttatcagctgacagtgcaagttatatagacttcaagtatgcattgcatcccaatacctacctggtagacttcagcatcgatgctaaaggtatggcagataaattggcagcaagcaataactatgtagacatcgaatgggcacaacgcgcccgccagatcgaaaaaggttatgtatatgagaaccgtttgtctgaactgacttataaaatgctgggaaatggcacagactacttgtcagccaataaggatgatgaaaaagaagtgcccgaacgtctggactggattgctttcaaaaatcaattcttctcctcggtattcattgcagacgctgactttgaaaaaacgaagctagtctccaaaatggaaagagaaggcagcggatatatcaaagactactccgccgagatgagcacgagctttgacccgacaggtaaacagcctacgcaaatgttcttctacttcggtccgaaccattacaagacgctgactgcgctggataagggacgtgatgagaaatgggaactgaaccgtttggtttatctgggttggccgttgatccgctgggtcaacaagtggttcaccatcaatatcttcgactggttgtccggttggggcctaagcatgggtattgtattgttactgatgaccttgattgtaaaagcagtcgtattccccgctacctggaaaacgtatatttcttctgccaagatgcgtgtgttgaaaccgaaaatcgatgagatcaataagaaataccccaaacaggaagatgcgatgaaaaaacagcaggaggtcatgggaatgtacagccaatacggtgtgagtccgatgggtggctgtctgccgatgctggtacagttcccggttcttattgcattgttcatgttcgtgccaagtgctattgaattgcgtcagcagagcttcttgtgggctgatgacctttcaacgtacgatgcgttcatcaacttcccgttcaatatcccgttcctgggtagccacctcagtttattctgtttgctgatgacggttgtgaatatattgaactccaagttcatgatgcagcaacaggataccggagccaacccgcagatggcggcgatgaagtggatgacgtatctcatgccgattatgatgttgttcatcttgaacagttatccttcaggtctgaactattactacttcatatcgacattgattagtgtggtgactactctcattctgcgtaagactacgaatgaagagaaacttcttgcccaattggaagcccgaaagaaagatccgaagaaagctaagaaaaccggctttgccgctcgcctggaggcaatgcagaaacaacaggaacagttgttgaaagagagacagaataagaaatgagttgacaagggaacgagttaacaagatacaagggctgcactgtactcaaaatggatagtgtggccttctttctctctattactctcgtcaacttgtccactaagcacctcgttaactaaaaaaaatgaaaactaaatataccaacaaacagatttggatgatagcctatccgatcctcatcagtctactgatggagcaaatgataggtatgacagacacagccttcctgggacgtgtaggcgaagtagaactgggagcatcagccattgcaggtgtcttctacatggtaatattcatggcagctttcggtttcagtatcggagcgcagatactcattgcccggcgcaacggtgaaaagcaataccgggaaataggcgaccttttctatcaaggaatttactttcagataggactggcggcagtaatgttcctgctctcctacttcctttcaccaatgatactgaagcgaatcgtttcttccgaacacatctatgaggctgccatcagttatctgaactggcgggttttcggagccttcttctcattcaatgcagtcatcttccgtgctttcttcctgggaactacgcaaaccaagacactgacactcaattctatagtaatggtattgagtaacgtagttttcaactatatactgattttcggtaaattcggctttcccgcgctcggcattgcaggtgccgccatcggttcatcacttgcagagctggtttcactgatattctttatcctctacacccgttaccgcattgactgccgtaagtttggactggatcgtatcccgaagttccgcccggagatactgaaacgaatgctgaacatttccttctggaccatgatacagaacgtcttctccttgtccacctggttcttgttcttcctctatgtggagcatctgggagaacggtcgctcgccatcacgaacattgtccgaagcatatccggcattctgttcatggtaatgatggcatttgcctcaacctgtggttccttggtcagcaatctcatcggtgcaggagacaaagactgcgtggcaggcactatccggcagcatatacgcattgcatacctgttcacattgccgctagcactgttttttgcactgttcccaaaacttatactgggaatctatacggatatacccgatttacaggatgcagccgtacattcactttgggtaatgtgctcggcatatctgtttctcgtacctgccaatgtatatttccaggcagtatcaggaacgggaaacacgcgcacggctctggtcatggaactgataacgctcgtcttctatgttgcctacatcacatacatcattctttacttgaaacttgatgtagctctgtgttggacatcagaaatggtatactccatttttatactattactttgctggtggtatattaaaggaggacgatggcaagaaaaacgcatataatttgtatatttgtcgcaaaataaccgtaacgaacaacatacatgaaacaagtaaatttattgcttatgtcagtagctatgacattggctgcctgcggcggaactaaagacgcagggcaagccggagtaccgcttatcgagcggtcggacatccaaattgaaggcaaacgcatgactcccgaagctctctgggccatgggtcgtatcggtggtgtagccgtatcccccgatgaaaagcaaattgcttacacagtagcttactacagtgtaccggagaacaagagtaaccgtgaagtcttcgtgatgaacacagatggaacaggcaacaaacaaatcacccacactccctggcaggaaaacgaagtgaactggataaagggtggcactaaactggcgttcctttccaatgaaggtggcagcagtcagttgtgggaaatgaatccggacggcagcgggcgtaagcagctaactcaatatgatggtgacatcgaaggttattctttctctcccgacggcaagaagttgcttttcattgcacaggtgaaaactaaacaaagtactgcggataaatatcccgatctccctaaagcgacgggtatcatcgttaccgacctgatgtacaaacactgggatgaatgggtaaccggtgctccgcatccttttgtagccgattttgatggaaacggtatcagcaatataaaggatatactggaaggagaaccttacgaaagcccgatgagaccttggggtggcatcgagcaactggcatggagtcctgccggagacaaggtggcatatacttgccgtaagaagaccggtctggcttatgccatctccaccaactcggatatttatatctacgatcttgcaaccaagaagacagacaatatcaccgaagaaaataaaggttatgatacaaatcctcagtactctcccgatggtaaatacattgcctggcagagcatggaacgtgacggttatgaagctgacctaaaccgcctcttcatcatgaatctggaaacaggtgagaaacgtttcgtcagcaaggaattcgaatcgaacgtagatggtttcttgtggaatagagactctaagagtatttatttcatcggtgtctggcatggtgaaacacagatttacaatatcgatcttgctgccaacgataaggttacgcagttgacagacggtatgtatgattatgcttccctcgcccttgcaggagataaagtaatcgctttacgccactcaatgagtatgggtgatgaaatctatgccgtatctgccacccgcaacggggatgcttttgccgaagcaaaacaactgaccttcgaaaacaagcagatttacgaccaactggaaatgggtaaagttgaagctcgctggatgaagactacagacggcaaacagatgctgacatgggttatctacccgccacagtttgacccgaataagaaatatcctaccctcctgttctgtgaaggtggtccgcaaagccccgtaagccagttctggagctatcgctggaatttccagattatggctgccaacgactatatcatcgtagctcccaaccgccgcggacttccgggctttggagtggaatggaatgaagccatcagtggtgattacggtggtcagtgtatgaaggattattttacagctattgacgagatggctaaagaatcgtttgtagacaaagaccgtctcggttgtgtaggtgccagcttcggtggtttctccgtttactggctcgccggacatcatgacaagcgcttcaaagcattcattgcacatgatggcatcttcaacatggaaatgcagtatctggaaacagaagagaaatggtttgccaactgggatatgggtggtgcatactgggaaaaacaaaatccggtagcccaacgcacattcgccaactctccgcaccagtttgtagacaaatgggatacacctatcctttgcattcatggcgaaaaagactaccgtattctagccaaccaggcaatggctgcctttgatgccgccgtaatgcgtggtgtccctgccgagctactgatatatccggatgaaaatcactgggtattgaaacctcagaatggtatcctctggcaacgcacattctttgaatggctggacaaatggttgaaataaaaaaacagacgattgaagtctcctgaaacaggccatctgttagggatgaacagaccgtctatttgatacgaacagaccatctattcgcagtgaatagatggtctgttttttatctctgcatcaagccctgtaattcaaggcataagcgttgttttacttcttccatcggcacctcccgtttcagctcctgttgcagcgaagtgactcctttatctatgaatccgcaggggttgatatagctgaaatatcgtaaatcagtattcacattcagcgccaatccatgcatggtaacgaaatgactgctacgcacgccaatagcgcatattttacgcgcacgcggcgtatctccctccagccaaacacctgttgctttctccaacctcccggcagcaatgccataagaggcacatacacggatgaccgcttcttccaacaaatgtacatactctttcagccccaacgagaattcttcgagattcaggataggataacataccagttgtcccggaccatgatatgtgatatcacctccacgatcgatatgatagagcgtagctcctatcttccgaagttgttcctcactcaacagcatatttccttctttaccgctacgacctaaagtatagacatgcggatgttcacacaaaatgatgtgattttcatactcttcccctgcctgtttggcatgaataagagcatcaaaccactccgtttgccgagtccatgcatcggcatacggaataatattccagtctgttacattcagtttcatgccgacaaagttaagattttagggataaaatcgtatatttgccgacagcaaaatgaaaaaagatgaaacataacttcccacaagtagatttgccggttgaaatgctggcatggagagatgttacagaagatattctgaatctctatcgccagtcatgccgtctgaaggcatgtatttttgcattatgcactgaaggaaccattacagcatccatcaatctgatggagcataaaataaaaaagaatgatctgatcattctgatgccgggaactatcttacagctcaatgagcaagtagaaaaagtacggctttgctttgtaggtttctccagtcactgcgtcaacggtattaatctattgcaggctacgatgggatctttctccaaaatatgggataatccgattgtaaatgtcagcgatttaatagcatcctacttcgtggattactttgcactactgacacgcatatcaatctcccatcctaccgccaccagtaccgcaatggcacaaagtgtgctccacagcattttgcttggaattaatgccctttatgccaatcgtccgcaaagcattcttgccaaaagccgcaaagaggaaatctgccagaaattcgtacaactggttattgaaaattatatgactgagagacgtgctcaattctatgccgacaagctgggaatttcattgcagcatctcagcactaccgtaaagcaagtaacaggaaggaatgtactcgaaattatttcgcatgtggtgattacagacgtcaaagcacggctgaaatccacagatatgactattcaggaaatagcctattcactgaacttccccagtgcctctttcttcggaaagtactttaagaggcacatggggatgagtccgttggaatatagaaatagttagtatcttaaacgaaggctgttcaagactaccgatacactggaaaatgccatagcggcacttgccaacatggggttcagcaataatccattgattggataaagcaatccggcagcaataggaatacctatcaggttgtaaatgaatgcccagaacagattctgatgaatcaagcgcaccgtctgccgggagagattgaatgctttcggcaacagcaacagatccgaagtcataagagtgaccattgccacatccatagcaatgtccgttcctttacccatggcaatgctgacatcggcacaagccaaagcctgtgaatcattgataccatcacccaccatagctaccgtctttctctgaagttgaagctggcgtacaaactcttccttatcatccggcaaagcatcggcaatatactggatattgcctaatcgtccggcaacagcagaagcagtacgttcaccgtctcccgtcagcatataaacttcaataccctgggtacggagttcgcgaacagcctcagcggaagtcgcctttatctgatctttgatagcaacaatcgcaagcaattcatccttgcggccaaagtaaacgatgctacaaccgtccgactcgtattgagccagcatttctcccaaaacatcagtcagggtggcatggtaatctttcaacaacttgtggctgcctgcccaatactcagcatcctgataagtcactttaatacccttaccggtaatactttcaaaaccatccagagttgcaggaacaatgttctcttgttcttgcaaggcagtgacaatagcaccagccagcggatgctccgatttaagctcggcagccagaagaatgtctttataatgtccttcctgcggctgcgcccataaccaaccggcaacggtaggatgcccttcagtcaatgtaccggtcttatccaataccacaacatttacctttcgcatctgttccagtgccacagcatcttttatcagaatatgatgatcggcagccttaccgatacctaccatcaaagccgtaggagtagcgagtcccaatgcacaagggcaagcaatcaccaatacggaaaccgccgacagcatggcatgtgaaagcatatccacaccactaaagaacatccagataaagaatgtcaggacagacaaacccagtacgacaggaacaaagatacccgtcactttatctacaatacgctgcacaggagccttactgccttgcgcttcctgcaccatacggatgatacgcgccagcactgtttctccacctactttctcggcacggataatgaacgatcctttctgattgatggttccggccaacacatgcgagccaatcttcttttctaccggaataggctcaccgcttatcatgctttcatctacataagagtcaccttcggtcagaaaaccatccacagggatttgctcaccggggcggacactcaccagatcatcaatgttcaattgatccaaaggtacatccaattctttaccgtcgcgtactacacgggctttcttaggttgcaaacccatcagtttgcggatagcagtggaagtatttcccttcgcacgttcctccatgagtttacctgtcaaaacgaaggcgatgataaccacagcagcttcgtaatagacatgaggctccaatccacggctataccagaaatcggggaagaaagtattaaagacgctgaacaggaaagcaatggatgtacttagtgccaccagtgtatccatattgctgcgtcccagacgtgcttgtttccaggcaccggtatagaatggcgtaccgaacaataccaatacaggaatagcaagtaccatctgtatctcgttagaataaggtacatgcatgaagaccatggaaagcaacaacaggggaacagcaaaaatccacgctcctatcacccgcgttttcaagcggtgatagcgtttctgttgttcttcctcctgacgttcttcaacatgctcttcctccatgatgaggtcatagcccgcagccagtacggcagcacgaatttctccgggtgtcagtttgtccgtctcataggagacagacaatgtattggaagcaaagttgaccgaagcatctgcaacgcccaccaacttgcgaactgtcttttctacgttattggcgcatcccgcacaatgcatgttcagcacgggaaacgtctgtttttttaaattacccatatattgtttttatttcaagttttatatcaaaacaatctctacaggccgtttgttcgactacttcttgtcctcttgtttcgtttctttcacgaattcagcttcgtagttgaacttcttgaaaccggctttcagtttatccacagttgtcttttcagcatcataagtaatggaaactgttttcgttttcaagtctgtagagaattcttttactcctttctcaaatttaatgttattcttcaccttccgttcacagttttcgcaatgcatctgtgaaactttaaagacagctgtacggatatcttttgccattactgccgttacactcaacaaagctactacgagggcagccatcattcttcttgttttcataatcaatttagttattagttattagtaattagtttcttgccaggttaaacctcaacccgatatatgctttcgccccgtgcatcggtccccacaccatggtagcatcgaaattctctccccatgggttagaagcatcgattatcggattcttctgtttaaagttcgtcaggttctcaccgccgatataaacagaccagcgacggaaatagcgcgtcacctgcgcactgagttgctggaaactaccgtaacgacgttcccacgaaagacttccgtcagacagctcataaggatcgggcatccttccaccaccattcaactgcaaggtagcatcgaattgccacaagcccagaggagtctgataagaagcagtcaacaagcctttatatttaccagtaagtggcttctccattaatttaccattataggtagttttcgcgtccgtcaaacggtaagccgcagtcaaagtgaagcctttgaacaacggataattggcttctacctggaatacatgcgaataagaacgcccatccagattgtaaaaagccacttcatgcggattgctgtccatatccactactacctgtttcagaaaatccgtatagtaatattctgcattcacattcagcgtcttaccgaaaagggggatataagtcgaaacactcgcaccgtaattccacgcttcctcttggtccagatgagaagcaatcttcatcttgcggctacttgccagaagataattattctccgccaatacatgattcgtacgatatcccttgccggcagacaaacggaaatgcagatattcattcggattatatttgacgtgggcacgcggcgtcacaaagaagccgtactcactactgtaatctccccgaatacctcccatcagcatcaactgatcgttcagattgaatgtatattggacataagctcccggaacagactccttcacaaatttcttcgtcagcccttcttctgcctgattcgtcagccgatagttctgatcgtaaccatcatagttgaaacttaatccggcagacagactatgctgcttactgagctccgtttcaaacagcagcgaagcataaaaattactctgatccacatcatacagtttacgcccgtaattggcatcctgattatgcaacgttccctgtaaaatcaaagcaagattcgtatttttctctttgtcgaagatataagcattcttcgtgaacgcttcgtaacgatttgttttgatacctatttcatacaggtcatgcgaaggagtatttccgtgtgcaatctgaccgctgtttcgagtttcatgcaacgcctttatacctgcctggaatacatagtggtcacccatatatgcccatcggttccagacattatattgctccacacgaggtatatctacaaaaccatcatcattagagtcatgagatttcgtctcattctcataatgtgccaacaaagaagtgctccatcgcttcgacaactttaccgtagcatccgcattggcttcatagcggttcgtactactggcaaaaagatttgccgacacccaatccgcttccggcaattgaggcttcttgaattctacattgatttgtccggttatggactcatatccattcttcacggacgaacttcctttgctgacctgtatactctgcatccacggcccgggtacgtatcctaaaccataaggagcggcagccccccggaaattgggaatattttcagtcatcatctgcacatacgtaccggaaagtcctaacagtttaatttgtttggctcccgtagctgcatccgagtagctgacatccacagaaggattcgtcacaaagctctctcccagattacagcaagccgcacgtgtcagttcggcactactgatcatatcttcattcatcacactggtgcgcagtttcatagttcccaatttgcgggtcactacatttacttcactcagttccactccttcacgaagaacaatatcaagttgttggtttcctttgtctacatgtatcgtgtcattctcaaaaccaataaaactaaccacaagcatgtggctgcgagcaggcttatgaattgaaaagttaccgtcttcattggtagttactccattggttgtattcatccaaaacacattcgctcccggaataggttctccggcagcatcttttacgacacctgttacttgcgcctgcaaaaaattaaaagtaaaaagtgaaattaataagaatatatatttcatatatctgaattcatttattaagggtacaaaaataggatatatttcatgcaacaaggttgcaagactatccagctatcaattctttaaaagagaacgtgcaaaggtatcatctccgtactcttagatacggacaaactacggaccagacacggttcagatatagctttggatagaaccgggcaggaaggaaaacacttctcctgcacactaattgattctaaataatgagaacagaatataaggccagatactgcctcgaactatcaggatgcggaggtacggcatacgacacctctttcaattccctcgtaggcaaggagtattggaaatccggtaatatttcgcagaaaagttgaatgacaggtacggctataacaggactttcacatgaatatttcaccaaatccactttataaaaagtagccgtacagccttcgtctttgcaagatttttccggtttatgagaagttttatgagatttatggcatttggcacagccattggtgcaacatgcttgcgctgtctcgcagcgggcacaacaataatggacaatagagactcctgcccctgcataaacaaccgtcagggacaataaaactgccaatatgtaacgaagtctcttcatatccggtgcaaagatagccagataaaagcattcatacctatcttttttcattttttatatgttctattcgttaatatgttctatatttgtcgataacgaactgatatcgaaatgttgaatttaacgaagaaagtccaaatgaaaaagcaatatgtcagcctacttgtcattctacttgcggcaagtggctttttattttcttgcggtaacactgtgaacaaaagcgcgggtgcgctggagttcgacagtatacaggtaaatgaggtagcccacctcttcggagacactgcgaagcccggctgcaacatcatcatcaactttgcatacgctaataagtcgtccgacgaaaagctgaaagacagtctgaacacctatttcctttcagcctgtttcggagataaatacatgactctgaagcctgaagaggcggtaaagctttacaaggaaaactatatcaaggattacctgaaagatttggaaccaatgtatgccaaagatgaagctgagaaagaagactctgcttcaatattagcttggtattcttattataaaggtattgaaagccacgtgcagtattataaaaaacatctgctggtttaccgcatcaactacaatgaatataccggaggcgcacatggtatttatatgtctactttcctgaatatggacctgcgcaccttgaacccgatacgtctggatgatatttttgtaggagaatatcaggaagctctcaccgatttattatggaaccagctcatggcagacaataaagttactacacgccaggaagtggaggatatgggctatacaagtacaggagacctggaaccgactgaaaatttctacctaagtcccaaaggtatcaccttctattataacatttatgaaattgctccttatgtgatgggcccggtagaaattaccttgccttatgagatcatgtcgcatctgctgagtgatgatactatggtattgaacgaaataagaaacgagaactaattatgatttaggacttccacccgcatcgtaaatcataaattataaatcataattcataaattattcacatggaaatcattctaaagtacttcccagacctcacagaggcgcagaagcagcaatttgcgaccctctatgatctctatacggactggaatgcaaaaataaacgtcatatcacgtaaagacattgaaaacctgtacgaacaccacgtactccattcattgggtatagctaaagtgattcgctttactcccggcacccgcatcatggaccttggaacgggcggtggttttccgggtattccccttgccatcttattccccgaggtgaagttccatcttgttgacagcatcgggaagaaggtacgtgtagcaacggaagtagccaacagcatcggactgaaaaacgtgactttccgccatgcacgtgctgaggaggaaaagcaactcttcgatttcgttgtaagccgtgccgtgatgccgttggccgacttgctgaaaatcatccgcaaaaacatcgcctccgagcaacacaatgctatgccaaacggactgatctgcctgaaaggtggtgagctggcaaatgaagccatgcctttcaagaataagaccatgatgtatgatctgaaagactatttcgaagaagaattctttgaaacgaagaaagtggtttacgtgacgccttaatcacagaaataatgactaacatatacctatcatgaaaataaaaaggtttgagtttaatatgttcccagtaaactgttatgttctgtgggacgacactcttgaagctgccgtgatagatcccggttgctactatgaggaggaaaaacaagcgttgaagaacttcattcacaaaaatggcctgaacgtaaagcacctccttaatacgcacctgcatctggaccatatctttggaaatgctttcatggtcaaagaattcggtctgccggtggaagccaacaaagccgatgaattctggattgacgaagctccgaaacaaagccgcatgttcggttttcattggaacgaactgcccgcaccgataggacactatcttcatgacggagatatcatcaacttcggtaacactacgttagaagctatccacgtaccgggacattcaccgggtagccttgtttactactgtgccgcagatcattgcatgttctccggtgacgtacttttccagggcagcatcggacgtgccgaccttaccggtggtaatttcgacgaactgaaagagcacatttgcagccgcctgttcatactgcccaatgaaacgattgtctatcccggacatggcgccccgaccactatcggtattgaaaaggcagaaaatccattcttcagataagagtaagagtccaccacagattacacagattcacacggatttctttatccgacaatcagtaaaagaaattattaatctgtgataatccgtgtaatctgtggtgaaaaaagaaagcataaacttttaatcaaaatatagatatgaaaaacgacctattagcttgccgccacatcggcatcagcgaaaaagacgaagagaaaatgctccggaaaataggagtcggcagtctggatgagttgatagacaaaaccatccctgcaaacattcgcctgaaagaaccgttggcattgcccgcgcctatgactgaatatgagttcggacaacacatcacccggctggcgtgcaaaaacaaactttacacaacgtatatcggcctcggctggtataacaccattacccccgccgttattcaacggaatgtattcgagaatccggtatggtacacttcttataccccctaccagacagaagtttcgcaaggacgcctcgaagcgttgatgaacttccagaccgcagtatgcgacctgacaggtatgccacttgccaactgttctctgctggatgaagctacggctgccgccgaagccgtaagcatgatgtacgccctgcgtccgcgtgatatgcagaagtccggtgcaaacgtagtgtttgtggacgagagcattttcccacagacactggctgtaatgactacgcgtgctatcccgcaaggtattcagatacgcacgggaaaatattccgaactggaactgacaccggatatttttgcctgtatactgcaatatccgaatgcaagcggaaacgcagaagattaccgtgcctttgtagagaaagcccatgccgctaactgcaaagtagccgttgccgccgatatcctgagccttgccctgctcacccctcccggagaatggggagctgatattgtattcggtaccacccaacgcctcggtacaccgatgttctatgggggaccgtcagccgggtacttcgctacgcgcgacgaatacaaacgtaatattccgggacgtatcatcggttggtctaaagataaatacggaaaactctgttaccgtatggcactgcaaacccgcgagcaacatatcaaacgggaaaaggctacttcaaatatctgtaccgcacaggctctgctggcaaccatggcgggcttttatgccgtgtaccacggtccggaaggtattcacgccattgcagaacgtatccacagcatcgctgcatatctggaaaagtgtatcaagaaactgggatacaaacaagtgaatgaccaatacttcgacaccctgcgctttgtgttgcccgacagtgtatctgcccaacaggtacgtaccatcgcattgagcaaggaagtcaatctgcgctactttgataatggagacgtaggtatgagtattgacgaaacaactgacgtatccgctgccaatgtgttgctctctatctttgccattgccgcaggaaaagactacaccaaagtggatgatattcccgtaagcaatactattaataagacgctgaaacgccagagcgcttatctgacacatgaagtgttcaataaatatcatacggaaacggagatgatgcgctatatcaagcgccttgaccgtaaggatatctcccttgcccactccatgatttcccttggctcttgcaccatgaagttgaatgctgcggcagaaatgttgcccctcagccgtccggaatttatgtgtatgcatccgcttgtacccgaagaccaggcagagggataccgtgaactgattaacaatctcagcgaagaactgagagtcattacaggttttgcaggtgtcagtctgcaaccgaactccggtgctgcgggcgaatataccggtctccgtgtgatccgcgcttatctggagaacatcggacagggacatcgtaacaaagtgctgattcccgcatctgctcatggtaccaaccccgcatctgccatccaggccggtttcactaccgtgacttgtgcatgcgatgagcaaggaaatgtcgatatggctgacttgcgtgccaaagcggaagagaacaaagacgatctggctgcactgatgatcacttatccttccacccacggtatttttgagacggaaatcgtagaaatctgccgcatcatccatgattgcggtgcacaggtatacatggacggtgcaaacatgaatgcgcaggtgggcttgacgaaccccggagttatcggtgccgacgtttgccatctgaacctgcacaagacctttgcttcacctcatggcggtggtggtccgggtgtgggtcctatctgcgtagcggaacatctggttccgttcctaccgggacatccgttgttcggtaatcctgtaaatacagtgtctgccgctccgttcggtagtgcaggtattctgcctatcacttacggatacatccgcatgatgggtacggaagggctgacccgcgcaacgaaaatcgctatcctcagtgccaattatctggctgcttgtctgaaggatacttacggcattgtatatcgtggagctacgggtttcgtaggtcatgagatgatcctggaatgtcgtaaggttcacgaagaaacgggcatcagtgagaatgatattgccaagcgattaatggattatggttatcatgctcctaccctctccttccctgtccacggcacactgatgatagagcctacggaaagtgaaagcttcagcgaattggaaaacttcgtgaaggtgatgctcaatatctgggaagagattcaggaagtgaaagaaggaaaagcggataaggaagacaatgttctggtaaatgctccgcaccctgaatatgaggtggtagccaacaactgggaacatagctatacccgtgaaaaggctgcttatccgatagaaagcgtacgtgaaaataaattctggataaatgtagcgcgtgtagataacacgttgggcgaccgtaagctgttaccgacgtgctacggatgctttgaataatctcatttttcggcacatcgtattaatcaagaagcggaactacatgatgatagttccgctttttttatctcctaataactaaaatagcatctcacaaaaaccggtgacggagaatttacgcagcgcagcaacataataaagaaaaagttgttacctttgcatctgtacctatttttaaagcaatattcatcatggctacaaaagaaattccatacggtctgagtgactacgcccgcctcgccctcgaaaactattattacgtagataaaacccactttatcccactgatagagaaggccgcttcgtttttcttcctcatccgcccccggcgtttcggcaagagcctcacgctgagtatgcttgaaagctattatgacatcaacaacgccaatcgcttcgaagaactcttcggagaacggtggatataccaacatcctacagcactgcgggcaaagttcctgattctgagattcaacttctcggcagtaagttccaacatcgaccggatgcttgactcctttgaggagcactgcaaagatcgcttcattgattttgctgaccgctacgagcacctcttcgctcccggcttccgccaggaactgatggaacgcgaaacggcagcatccggcctaagctacatcaacaccaaagccagcttcctaaaactcaacctctaccttattatcgatgagtacgacaactttaccaacgccatactctccacctacggcaccgagacctatcagaaggccacccacggcgagggattcttccgcttcttcttcaacgtgataaaagccgccaccaccggcagcgaacaggcactgaagcgaatgttcatcaccggagtgtcgcccatcacgctggacgacgtgacgagcggattcaacatcggctccaacttcagcaccgacccacaattcaacggcatcgtcggcttcagcgaaacggagctacgcaccatgctcacttattacaaagaagagggcacgctgaaagccgaagtagaagacctcatcacgatgatgaagccctggtatgacaactattgcttcgcggaagaaacactggacgagtcgatgttcaactcggacatggtgctctatttcctctccactttcctgcgcctgggcactccaccaaaggagatgatcgacaggaacatccgcacggactacaacaaaatacgtcacctcattcgcatagaccgagagttgggagccaacttctccatcatccgcgagattgtggaaaacggacgcactacggccaacatcaacagtagcttccccgccgaccgaatggtagacaccaacaacttcaagtcgctgctctactacttcggattgctgaccatcagcggcacggagcggggaaacgttgtactcaccatccccaaccagacggtacgcgaacaactctacacctatctcgtcgacacctaccaccaggccgaactcttcgcagtagatctcaacaaactgaacaacctgatggcaggtatggcctacgacggcgactggcaacccgtcttcacctacatcggtgaagaattgaaacgccagagtcgcatccgtgagttcattgacggcgaggcgcacgtgaaagggttcctgctcgcctatctgggattgactaattattactatctgcaaccggaatacgaatcgggcaagggctatgccgacttttacttccgccccaacccctcggtaacgggtattccctatctctatctactggaagtgaagtacgccaaggcctccgatcccgccgacaaagagcaagagctcatgacggaagcccgcacgcaattattgcaatatgccgccgaccccatcgtgacacagagcatcggaacggcaaaactaagactcattaccgttgtcttccgtacatgggaagtgatagcaatggaggaggtagaagaaatagaataaatttatcagcgaagaacgaaagtgtaaacatcgcatttctataaatgagcatcacccgaaaaaagaaacaaaacggacttttctacacaaaagccgaagagagaataaataccctctcgcacgccgcaggcatcctgatggggattattgtcggcacgatatttctcgtgaaaggctatcagagtggaaacttctgggctgtatttggcatctggctctatctcttcggtatgcttggctcttacgtctcctctaccctctaccatgcgctgaaataccataatccttggaagaaacggttgcggaattgggatcatgcagctatttactggcacattgcaggcagttattcacccgtcacgctgattgcactgcggaatgaaggtgcctggggatggggattgttcggattcgtctggctatgcgccataatcggcactatcgtgagtttccgcaagatggaggagcatagcaatgtggaaaccatttgcttcattgtcatgggattgtccgtactggttgccttcaaacctctatatgccattgccgaaggaacttgctactggatgattgccgaaggagtctgctacatcaccggagccgtattctactctttccgacagcgatatatgcattctgtcttccacttcttcgtactggcaggatcggcatgtcacatagtggcggtgtggcttatcctataaaataaatacgcaggaaattacattaatccccttacaacacatcacatacacacccatccgaatttacgcacaagttccgccaacaggctacggtcttttacagggagattaattaccacattctcacgcatatctcctgacaatatatatccctcagcaggcaatttatcttcaggcaacgatttctccatgagcctctcgtgttgatattgccccgtctgaaacactacatcaaaatattcatgtttgttttcaggatgaatgaaaagtgagcgtaaatctataccgccactcaaaaagtcttccaaacgccgggcagaaatacgaatacctgtatagcgacaaagcaattcatcttcatatagcaaacaaagatacaaagtatcaaaggcatcacgtgccacaaaaagctgtggtacatcacagaaatccaatatcttttctatccttaatacattttccataatcagattactttagcttgtgaaacatcaaaatctttcgttctccaccaagaataatgtgcagtgccgaaagttttctttatcatcccatctttaggcttcaattcaaccaaggcaatatttgcattcctgaactttggaagcttcaatcttttctcagcctctttcctgtcagaaaacaaagaaacggctcttgttatacactcatctacgcccagccccttaaacactttgtccggttgcagtcttctctgcgaaaaaaaatctaccgattgcgcaggattgccgtttgctattctgtaataataaccatcacactgttgagcatcttcgggtggacattgttctggcaacaactcaaaccattctacttccattatttccttatctgtgtatttctcgcaaagttactgcttctgtacaagtaaacaaatatttctcagaatatttatcaacccaaatatatcaccatttcacaagatatttatgcaacaagttatcctgaatcgaattcaacgcatgttccattttcacttcttcgtactggcagggtcggcatgtcacatggtggcggtatggcttatcctataaacatccatctgctaaaatatattaattaaagtctctcttccttgcttttctccttagcatcatttacgtttgcagtgttgtacatcagtgcaacacctataaagttatgataaagatagagaatataagctacggctataagcctaaacaacctattttcagtgatatatctctaaaagtaggcagtgggatatacggactcctgggagaaaatggtgtaggaaaaacaacactgatacatctcatttgcggacttcttttcccttggaaaggtgaatgtagcatcgataacagtaactccgcccgaagaagtccggaattgctgaaccgctacttctttctaccggaagaaatgcaaatgcctactgaaagtatctatcagttcgccgcccgccattccgtattctatccccgtttcagccgcaaggatttcgaacagaacctggaagaattgcacatcgatggaaaacagaaactttccgccgtctcctacggacaacagaagaaagcgatgctggcgtatgccttagccctgcacactcccctcaccctgctcgacgaacctaccaacggactggatattacctcccggcaagccttgaaacgtatcatcagtcgcaccgtggatgatgaaagcaccttgttcatctccactcatcaggcacacgatttcgaaaacttgctggatcacctcatcatcctcagcgaaggcgaaatcttactgaaccgctcactggatgaaatcagcgaacggctgctttttgtccgcacagcctatctacccgaagatagcctttatagcgaacaagacctgcatggctacttctccatcctgcctaatgaagagggagaagagaatacaccggacattgaactactatataaggcagtgctgcaagtaccggagaaaattaaaatgatatggaacgaataaatcataagaagaaattatgaatacaacttttaatctgaaacgtttcttcctattggagaaatacaagaagcaagaaaccggaaaacacttgttatggagtgcaggtgtcgttctggggatttgtattctctgtatgatgtatgatattaataaaggaatgagttattataccgaacatacacaagccaattacttttgtagatatatcttgtggtatatctgcattgctccttgcctattagagccaagtatgaccaagcacaattctaccctttatttgttgctgcccgcttctgcttttgagaagttccttcacttatggatgaaatatatactcatactcccgatattttgtatgatactgatattaggaatgaaaggggtacttaccctatcaggtaccggctatctgtcacacttcggtaatcacatggaactttatataatccaaaaagatcagatcctgacatatagcctgttacaaggtaccttttttatcggttgcatagcctttaaacaacaaaaactaataaattcttttgttgtcttatgctcctgccttattgcctttttcggaatcatactttctataagtttatgggaaccggccgacaacaaccacggatattggatagcaaacatatcctatccgatatataactttccgatgagcagtacgggagaagccatcatcgctttctgcaactatgccactcccccgctgtttatcatcggaacatgggtatcagtctacttcctgctcaaagaaaaacaactgtaagctatggagtttaaaaccaacaaaccaatataccaacagatcgtagacttctgtttcagcaagatactcacccgggaatggcgggcggaagagcgggtagtctcggtcagggagctttctacacagcttgccgtgaattcgcgcaccgtaatgaaagcctacgaatacctacaggcggaagacattatttatccggaacggggtatgggcttctatctggcaaaggatgcggtgaagaaagtgatgaagatacagaagaaagaattcttcgacaaccaactggccgatgtattcctcaatatggaactgctcggcatcagcatagatgaagtgatagaacgatataataaacttaaaaacagcagttcatgaagagatacgcaaagacagcattatggattaccttcggactcctcttcgtgctcatcatagtcaaagtttttactctgatgtacgaactgaattccgctgtacagtcttaacttttacagcctcgacgccgaaagtataaacatctgaaatacaaattatagaatcttccctgacagggaggagtaccttctacatctctaatcaaacagtaatctactaacaggaacgaatatgaaaacaaaactatttttactactgactgtcctttccgtactcagtacgcaggcacagaaccttacaatcaaaggacgtgttacggatacttcgcaagaagccatcatagccgccaatgtatcgctatggaccacggactccactctggtgaccggagtgacttcggacacgcagggtaagtttgccctcaataaaatcaaggcgggtaattaccgcctggccattacttttatcggctatcaaagtgaaatcatcctactgaaactgaacaacaacctcgacctgggcgatgtacagttgcaggaagatgccgtaagcctgggtgaagtgaccgtatccgccagcaacgtgcttcaacgcgtggaccgtcagattatcctgcccaccgagagccagctaaaacgctcgttcggtgcctacgatctgctgaataacctcggcatcgcccgtctgcaagtggacaagttcaccaatagcatgagcatcagcggtggcggagccgtacaaacccgtatcaacggcatcaaagtgacggacaaggaaatagccgccgtcagagccaaagacgtgctatgcgtggagttcatcgaagacccgggcaagcaatacggtgacgacgaactgggtgccgtagtcaatattatcctgcgtcgccgcgaaacgggtggtgtggtgaacttccaactttccgactcgccccataccctgtggggagagaatttcctgagtgcgaagttcaactacaagaactccgaatggggcatcgactacttcaacaagaatggcaaataccacagccgcctcgaatctcacgaaacgttctatctgggcgaccgtaccatcgaccgcatcaaggaaggtatcgaagatgaatctcccgcactcagtttcatcaacaacctgaatctgacttacaatctgacaaaagcggacaagtatgtattcaacgccatctttcgcaataacctcaacaacgctccctatcagaatgaactgaacaaaatgtgggcggcaggcgatacggaatctatttattcgtacgtcaacaaccattcgtccagctattctccggcactcgacctttacttccagcataccctgccccatcagcagagcattcagatgaatgtgacgggaacgctcatccataccaaaaacaaccggaaatataaggagtacaaaaacgaaaatacgccactggcagacattcagacactggtggacggtgacaaacgctccatcatcggtgaggccatttatgaaaagagtttcaaggatgtaaaactaagcggcggtacccgccactatcagatgaggacggaaaatgagtacaaaggttccaaccccacaacttcgaagatggatcaggcacagacctccgctttctttgaggtgcagggcaaggtaaaggagttcagttatgcaggcagcgtgggcatgacgcgcgcctggttcaaggaaagtgacgaagaccatacttactatactttcacgcctaccgtacgattgagttataatttgaagaaagcgggtttcttgcgctaccggttcaatattagtcccgccataccttcactcggttcgctgacggatgtggaacaggctattgataccatacagattgttcgtggtaacccgttgctgaaaacataccagcagttcacaaattccttgtcctacagttattctaagaaacagttcaatgccaatctgagcctgcgccatcagtattacgacagtcccatcatggaaagtatcttcgtcgaggatggaaaactgatactgaaagatgaaaaccaacgctcatttcagagcctgaatgcggaactgatgatcggcacaaacggggcaacactgttcggactgaaagatttcctgactctttatgcttcgggaggatacacccgcagttggtcggaaggtttggaatacagccacacgtacgatgaattttactacagtgtgatggcgcaactgcaatacaaaggcttctctttgctcgggcaattcaggaaggtgcagaacaacttcttcggtgagaccatcaagaagaatgaaaatcagacggcatttatggcaatgtacgccaagcagaactttcaggcagggattggtgttctgtttcctttcaccaataattataaggtgggaaaagaacgcatcagtgaggtggctcccttccgttcggaaacttttgtgaaggagacggggcaaatgttcatactccgcataggctatacgttcgagttcggccgcaagcacaaagccggaaacaagggattgaacaatagtgatacggacagtggcatcattgacatgcagagataaagatccggatataatttcatttcagccctctttgtgaaaagaggaagtccaaagggcgaggtggcggattatacaaaattgcttcatgtataattcattaattacctgactgccgcctcccctgcggactttttctatttataaacgggaagaaaaatctttcttccgcatgatccctttttcatccttattcttcatttccagtttcaaaggatgaaaccagcagtttctcggtgtgaaactgtcagtttcaagcaatgaaactactggtttcacggcatgaaactgagagttccaagccatgaaacaaatctgggaacatggagatgaattttatcaggttgatagctcctgaaaagcaggtccggtattacttaataatagtcacagtgccttctgcaagctgcctttccttaaccggggcagctgccgcataacctaaagcagcgcaaccgtacacacgatgattttcgggaatacccagcttcgtcaggaaagcacgtacctcaggatcatcataagtctgccccaattgattgatccagcaggagcctattccgagagattttgcagcaaggaagatattctgcatggcacaggcacaatccatagctgcccaccactgcgtcggttcattggatacgatgacaagcgtaggcgcatgataataacagcaataggtctggctgtgtccacgctcctgcaaacggggctcttcactcttggcaaaagcgcctttgatcttctcattcagttcttccagcaccgcggcattctgaatggctgtgaaatgccacgtctgatagttcataccactgggagcataggttgccgcttccaaaatagcattcagatcttcttgtgaaatctgttgttccgtataagcgcgtacactgcgacgcgacttgatggcttttaaaacttcattcatactctttatttttttgtcaatccaatctttacattcagtctgaaataatacacgccgttctctttttccagaaaaccgtacttgtccttgtctaccgagcctttctccaaacgggtattcaggaagaggaaatcggcaaatgtccggtgctccgacttatgatagcaaagcacttctccttctgcatccaccagcagaataccttctacggcagagtccgtaccgttataaatctttgccggacgcataccaaaggcaagtgccaacaagaactgcttcatcttaaactcgtagaaaccatgcttgtttatcagctcatcttttatcttcaagggatttatctctttgatgcgttccgtcagttcactgatacgggctatgccgtcgagatgcatcatacgcaccatttcagccagcatacgaggaaaatgcaaatcaatcatcagcaaattacaacggaatacacggtcggctacatcggaatatttcagtactccgcccagacgttcaatcatcagcatacgctcagccacctccgtaggagactccggcaaagcattcaccttattcaccgtaggcgtagcaaatttaacacccgactgttccagtttcagatttgccgtacgtccgccatcaagcaacggattcattgaactgagacgacaacggacattgaatcccgtcagcggagcctcgggatgccagaaagctactgagaaatccgtacggtcttccgtcttcgcttccaagtcgtagatattgaccgcatccagaaatgcctccagtccttcgggaacttcaatggcgtcagtgccactggtagtcttcagtaactcaaggataaactcggccgctccaccaaaatcttcacgggggatgacttgttcctccttatcggctgcaacaaatgccccctccttctctatcacaccactgacaatgcggacattgccctgctctatataataacgacgcgtaccgtcatgttcctccctctgtatcagcgcaacaggccagcatttcgtttcatccttccggacttgcggtgtacccagtgaaacctttccgtctgccaggaggcgaaagaatgtgtagagttcgcccaactcacgttttgtagcttcgaatgccataataaattgttttttttcctaattaacaagtgtgcaaagataatgcaaatcgaaggtagaactttcatgctggcatgaaaaagttatgctgaagtgcagcttattttatttaaagataaggaaatctccccaaaagaaagtgaatggacaaactatttccatgtagaagcgttctacttaaaacatcaaacatttaactccctatagcatggaaaatgaaaagaatatagtagccatcacagctacaccgaatgggcctttcattgtggaaggcaattttaaactgatagacagagaaggaaaagcggaaatacgaacaggcagaattgccttatgccggtgcggtaagtcctataaacaacccttttgcgatggtacacaccggaaaatccactataatgatttatctttgaaataaacgcactggatcaccagaaagccggagacattacacttcctcgaagcgtaatgtctctactttttccagacgcgccttcaacttcggcatcatcgacttccggatgcgaagtgtcatacggcaatccatatcatacgactgttccagaatttccggttcttcttcctttacgatacgcattacatcattcataaagggatattcaaacaagaaggtcaccgcttcgtccaccgttttctctatcacttcggcaacagctatcgcctcggcagcggcagctttataagcaacaatcagtccgcttgttcccagctttatgccaccaaaatagcggacaacgattatcaatatatccgtcagttcattggagtttatctgtcccaggattggctttcctgccgtaccggaaggctctccgttatcattggcgcggaaatctttacgttcgggccccagcatataggcgtagcagacgtggcgggcatcataatatttcttctgataaacttccagatgcgattttacctcatcgacagtacgcacgggcaaagcgatagcaatgaacttgctgcgcttctctgtgtaaatcccttcggaaggggcgtttatggttttgtaggtatcttcactcatgctgcaaagataagtattcttattgttatgagaaaatagtttctaatcctctctctttttcagacgaaacaggcagactttagaagttttttcgtaagtttgtcaaaagtacagcgcattccatagaaaaaagtctgattatgagtatgtatcagggcctcatactgataatcttagcatgcaaggtcctcccataagtaacatttattactatgaacaacaagctgtttacctttctcgaccctctgctgggttacatcgacaatggtcgtttcttccgcgaacccttccgctggctctatgtcatctttgccgtattgaacttgctgtttcctatctttatactggcaaaggtcatcgagatggacttcttcaaatatgccgaagggaaattaatccttgctttcattctgctgttcattatcctttgcgcaggagcatggggaagctatctgctctggatgaaccggaaaaacaaactgaaagaagctattcaggaagaaaatgaattcattgccattcctgttgtatcgcacctgacgcagacgatgggtgaatggctgggactttatatcggtgtcatcggtacactgtgttcggtggttattgcaatctttgctgccaatgaaatcagatacatactgccgataccttccggtatgttcttcctgatgcctatatacggcttcctgattgtggtgttcgcacgcctgcttgccgagttgtatcgcgcattggccgtcattgccaacaacaccaagaaattgacaaagacagaagcaaaagccgaagccaaactggaagatatagaagatatagaggaaatctaaatatatgaagaaagtagtcatagctattgactcctttaaaggatgtttaccctcggcagaagctggaaaagcagctgccgagggtattcgttccgtatacccggaatgtgaagttatctgcctgcccatagccgatgggggcgaaggaatgctggatgtgctgattatggcaaccaacggtcaggaagttccaatctccgcccacgatccattgatgaggtggcgcaatacttattacggcatttccgaaaatgaggaaacagctttcatagaaatggcaagcatcagcggattgcctttagttccaccggaaagaagaaacccaatgctgactaccacttacggcacgggagaaatcattcgtgatgctctggaacgtggttgccgcaactttatcactggcattggtggcagtgcaaccaatgatgcggggttaggaatgcttcaggcattaggctttcgtttttcagacaaggagggtaaaaaagtaggaacaggctgtggagaagtattaataaaagtagcgcatatagacagcacttttgtccatccggctttaaacagttgccgatttactgttgcctgcgatgtacaaaatccattctatggtcccgaaggagcggcttatgtctttgcacctcagaaaggagcagaccgggaaatggtggaggcattggatgcaggactgcaaaactttgcagaagttatccgtcatacgacgggaaaagatatttcccatcaccccggagccggtgccgccggaggtatgggtggtagtctgctggctttcctgaatgcggaactgaaacccggcatacaactgatgctggaagctcttgacttcagtaataaaataaaaagcgctgacctgatcattaccggagaaggaaaagctgaccggcaaacattgatgggaaaagttccttccggcatacttgctgaagcccggaaacaaaatattccggtaatcctgttagccggcaacatagaagattcggatgaattacaacaagccgggtttgaaggggtcttctctgttaaccctccattcatatcgttagaagaagccatgagaccggaagttgcatgcaaaaacatacagcaaacagtcgaatctatttgcaagaaataaatgattagaagcaagtgtgtctccgtatcagagtttatgtatcactctgcgacaacgtttcatttccctttccgtcagtccgggatgttgtttcgttccgcctttctcgatggctgaaacaactttaaagccgctccatttcaggatttctttcagcgcttttactactccccttgtctgattaaagaatatattgaaaggatatggagtagtgcaagtgcttacgataactgcctttttacctttatgcaggccgataggaatacctcgtgaggtctctcccatcattccgtaaacgatgcggtcgaacatcactttcagttgtcccggcaggtttccccaataacagggagcgccgattatcagtgcttgtgcttcttctatctgcttcagcacacgttgtgcatcatcctcgggcaaacaacatttcagtttctcacggcaactcatacagccgatgcaggggcggatttgcaggtcagccactctaatcacggtaacttcgtccccattcgcccgggcttccgtttccatcaattgcagcattttcgagatatgtccttgcttgcggggacttccgttgataatcagtattttcataattagtccgtatttacgcaattcccaatagctggacgtcaaacaccaaagtagagaaagcaggaatagggccactgctacgtgtaccatatcccattgcataaggaatataaacaatccaatgatctcctacatgcattcgttgcagggctatctgccagccttcaatgacttcattcagacgaaaagcctcagggtaattccgtttccaggagttatcgaactcgcggccatttatcaaagtgcctttataatgcacagttacgatactattcaaacgaggagtattgccgccattcccttcttccaatacccgatatagaattccgcaaggcagttcccggatatcattctctgcacgcaaagcctccaggtaccgctcattctgcaatttatattcttcttttcgtcccataagttataaatgattcttctttcccacaaaagtacaacatttatgctatcaacccaaatatggaataagctcatcgtgcgtttttggagattatatgaataagcggtatctttgctccatgaaaaaattagttattgtcggatgtggacgactggccggaatagtttcggatgcagttgttaatggcttattgccggaatatgatttagttggagtttactcacgcacagcagaaaaagctgaacgtatagttagtaaaatgcagcaacacgggaaatcctgcgtagcatgtacaaccccggaagatttactggcactgaaaccggattatctggtagaagcagcctctcctgctgccatgaaagagtttgcattgcccgccctaaagaacggtacttccatcgtcaccttgtctatcggtgctctggcagacactgcattctatcaggaagtgatggagactgccaaagcgaacggtacgcgtgtatacatcgtttccggtgctacgggcggtttcgatgttctgcggacagcttctttaatgggaaatgcaaaagctaaattctttaatgaaaaaggtcctgatgccttgaagggaacagctgtatatgatgagacattgcaaacggagcaacgtgttgtcttctcaggaaatgctactgaagccatagccatgttcccaacaaaagtcaatgtagccgttgctgcttcactggcctccatcggcccggagaatatggaaatgtccatgcaatccactcccggattcgtgggagacactcaaagagtggaaataaagaacgatcaggtgcatgccgtaattgatgtgtacagcgccaccgctgaaattgcagggtggtctgttgtgaacaccctgcttaacataacatcaccgattgtattcttctgattacattatcggttatatacttctatattggccagtactttctcgctcaggcggtcaaacgcctgacgggtacggcctgtagacacctgcatacagcggacatgcggatggcttaaaagatgcgctccacccaaagctcccagtgtatcacaaaaacaaaggttatcacctttcagccacttaacgaacgcgggttcgtcccacgccggagacagcccggtattgaacaatatctttttatttccgagttgttcgaactcagcctcatgcaacaggactgtattcttattgaggcaacagaaaacgacttcactctgagaaagaagttctcccaaaggtaagaaatgatatcctttggcagccgcatcctctttttcactacgggcaaaataagcgatatccgccccaaagaatttcaatgcattggcaatcatgccaccggatttacccaatcctatgacacctactttcagccctgtgatctcccggggcatttcttcccaggattcctgaccaaatccatgcaggcaacgcaccagttcgctgactacatattccaccacaccttcatccccataatcccggataccggttacagtaatcccccgttcgttcgcataacgaatgtctacattggcactctccggcgaatacagcgaacagcacataccgatatatcttatatttggacacttctcgagcacactcctgtttatttgtgaagtataactcaatagcacagcgtcggcatctccgatacgggctactatttcatcatcccctgccggaacatcagggaacatcactaccttttctgcatacgaatgcagtgctttttctgctgacggaatcagacttacgggttctattgctacaagtttacgaaacatagttttttattttagagaggacgaagttagcaaaaagagtgatataaaacaaaagagctgccatcgatcatacgtgacaactctttcttactatctttacgacaatactttttcttgttcttatgcggacgatcttttgcaatccaacgtccaccattgcgttccatctctatcaagcggttcgcttccttgaatgccgacagggcatccctacgttttttcgtcttcattgttctacaatttttatacattacaatatagctgaaaggctaatgttttgcaaagataatgcaaattgagtgcagaactttcatacttgcatgaaaaagttatgccgaaactatcctctgctgcccaaactattcttatccggatttatctccgaaaccatattgcgcacttctttcttatcgactttggaatataagcccaattgtcgtccaggtaatgttccttcagcatctttttgtatcttgctcttctcttcaagagccttttcatcttttttatccatatcgttatctggtttaggttatttactgatatactaacaaacagatgctccttaaagttctactttgctgcaaaaaaagagagttgacagggacattgtcaactcttttttttaaattcttcagaatagagtatcatttcttactcagtttcagctccgtaataaaagcggcaacaagccctataccaccaaatacaagtacacatgctccataaaccaaggaaactgtttctctatacacacgccaatcatccatattcttatccaaatatccgggaaccgatgaagtacagataataaaacctatcaacagacctaaccccatacccagcagaagacatcctatcttcaacgccgaaaaagaataattactgtgaaatctcggtatagatgccacatccggttcatatttatctcccattttctcaataagcatcaaccgctctttcttacatacaaacagttcaaacagtttgtaaatccctacagtaatgattgccattatcgcaggcaccataataaaattcatcatattcgtttcgttttaaattagtatttttgttcctttgtacactttagacgcagtgtcttgtgtaaggttacacatttcatcgaaaaaaaatatttctcagaaacaatgtaacctcctacaaagagttgcgtctaaaaggcagaatggagaataacgaaacacatattatccaacgcatactgagaggggaaactgctctatacgaatacttcctgaatcaacacggtcaacaggtcttttccctgattgcccgcatcatctgtaaccaggaagatgccgaggagttgacacaagacgtttttctgaaagcgttccagcacctctcctctttcaaagccgaaagttcgttctcaacatggatttattccattgcttataatacggcgatttcggcaacccgtaagaagaaattcgatacctttgccatggatgatacgttgctcgccaacatttccgaccaacaagtagatgaaacgcttaatgatgaaagtgaggaaatgattatcagattaaacagagctatagaaaaacttaactcagacgaacgtgccttgattaccttgttctactacgaagaaaagtcattgaatgaaactgccctgattctgggcctgacggaaagcaatgcaaaagtaaaattgcatcgcgtacgcaaaaagatatatgtactcataaaacaagaggaagtatgaacgaagaacaaaaagacaaagggctgaaaaaagccataaaagaggaaaacggatttcgtctaccttccaatttcgcctaccataccatgaggaaggtggaagaagccatacgcttacgcgaaaagaaatcggaacgaagaacgctgtttgctacgatagccgcttccatatttttaataggatgctgcattgccggattagtgatttatttcggtaatacaatcagagaagccttcacccgccccgaaatactggaaacggaaaagattcaaattccctcattctatttactgatacttatcgcaatgcctctgttccttatctttgaccgctggatgaggaaacgatattttaataagcatcacccttaaagaaaaagcgaggatatcctttgcaggaacatcctcgcttcacttttttattccatatttaatccagcttatgaatcaccaaccccgaacgtagtttcggttcaaaccacgttgtcttaggcggcatgatattacccgtatctgcaatatccatcaattgcttcatgctgacaggataaagtgccaaagccactttcatttcaccactatccacacgcttcttcaactcacccagaccacggatacctccaacaaaatcaatacgtttatccgaacgcagatctttgatgccgagaacttcatccagaataaggttggaagagatagtaacatccagtacaccaatcggatcattatcattgtaagtacccagtttagcggtcagactgtaccacttgccatccagataaagggagaaattatgcaaaccggcaggtttatagatttcagtgcctttttcttctaccgtaaaattcttgctgacagcagtcaggaattgttcaggcgtcaagccattcaagtcttttacaacacggttgtaatcaataatggtcagttggttagcagggaaacaaacggccatgaagtaattatattcttcattaccggtatggtttacattttgcttggctttctccgctcctaccaaagcggcagcggcactacgatggtgtccgtcggcaatataaagagcaggcatcttagcaaattccttcgtaatggcatcaatgtcttcctgcttatcaataatccagaaagtatgaccaaagccatcaccgggagcaatgaaatcatatatcggcttttcggctgtataatgagcgataatagcatccaaagtagcattgtcaggatatgcaaagaataccggttcgatattggcattattcacacgaacatgcttcatacggtcttcttccttatcgcgacgggtcagctcatgtttcttgatgacgccattcatataatcaggtacataggcacctactactaaaccgtattgcgttttcccattcatggtctgcgcatagacgtagtagttttctttatcatcctgtaccagccagcctttgtcctgaaacatctggaagttttcggcagctttctgataaacacattcatcgtgttcgtcagtacctacgggaaagtctatttcgggtttaatgatgtgatacaaggatttttcgtttccttttgcctcttcacgtgcttccgctgagttcagcacatcatacgggcgggaagctacttgctccaccagatcctgcggtggacggatacctttaaaaggtttaattattgccatggctagatttatgatttatgatttatgatttataactcatgaactatgaagacttttgcttggtagtgagaataccacgcgaacagcatacttcaacgccttatcatacgtcagtttttccttcataaatcataaattataaatcataaatctgattatttcttattaacacggaatttctcgcaaccgtctttcaggaaaccaacaatctgttgtgcagcggcaataccggcattgatgttagcttcagcagtctgtgcacccatcttcttcggtgtagagaaataacggcctacgaacttggcagcaaatgtttcgtgagctgcgggcatgatatcagtcatgtatttcagatcaccgcgttcttccatcagctgaatcagttccgcttcgttgataacttccttacgtgcagtatttaccaatacaccacccttcggcattttatttaccaaagcatagttgatagaattcttcgtttcagcagtagccgggatgtgcaatgaaactacgtcacaagcagaataaagctcatcagcagagtcaacagctttcacgccatctttctcaatcacttctttcggacagaaagcatcgaaagcaaagatttccataccgaaacccttggctatgcgagccacgttgcgacctacattaccataagcgtgaatacccagtttcttacccttcaattccgtaccggaagtaccgttatacatattgcggacagccatcaccatcataccgaaagcaagttcggctacggcattagagttctgtcccggagtgttcattacgcatacaccatgagcagtggcagcttccaggtctacattatcgtaacctgcacctgcacgtactacaatcttcagttcttttgcagcgtccaatactgcggcatctataatgtcgctacggataatgatggcattggcatccttcactgcgtccagcaactgggctttttctgtatatttctccaacaaggcaagttcataacctgccgcttcaatttctttgcgaataccgtctacagctactttagcgaacggtttgtcggttgcaattaatactttcatgattcttatgatattaaaaaaaaagactcaccacagattacacagattatcacagattttaatcataaaacaatctgtgggatctgcgtaatctgtggtgaataaatattattaatgaagtttctcaaattcctgcatgcagtcaatcaaagcctgtacgctttccttcggcatagcattgtagcaagatgcacggaaaccacccactgaacggtgtcccttgatacctaccatacctctttctgtagcaaacttcatgaagtcagcttccagttctttgtattcgggagccatcacgaagcagatgttcatgcgtgaacggtcttcctgtgcggctgtgcctacgaacatcttgttgcggtcgatttcagcatacagcatatctgccttttctatggcacggcgttccatttctttcacaccaccctgtgccttgatccaacgcaaagtctgcaatgcagcatagataggaaccaccggaggagtgttgaacatagaaccgctgtcaatatgtgtctgatagttcagcatcgtagggatatagcgggataccttacccaaagcgtcattcttcacgataacgaaggttacgcctgaaggagccagattcttctgtgcaccgccatagatacagatatatttagacacgtcgataggacgggagaaaatatcggaagacatatcggcaatcatcggaacgtttacatccaggtcttctttaagttcagtaccataaatagtgttattggtcgtgatgtggaaataatcagcatcagcaggcactgtataatccttaggaatataagtataagtagactctgcggaagaagcgacttcaactacttcaccgaaagctttggcttctttcatggctttcttagcccatacacctgtattcaggtaagcagctttcttttcgaggaagttgaaggggaccatgcagaattccaaactggcaccaccgcccaagaacagtaccgaatacccttcagggatattgagtaattctttgaatagtgctacggcttcgtccacaacaggttggaagtccttagcacggtggctgatttccatcagtgagaggcctgagccattaaaatcaagaatagcttttgccgtatcctcaatcacctcacgaggaagaatagaaggtcctgcattgaaattatgctttttcatttgaagtttgttttggttatacaatttcgttcattagtgtctttagaccttgcgaaattacggaaatatttctttaaaacaaacctttcataatgaaattctattttaacagcgcatttagcttacttttttatggtttatacaggatatatgcaccattttgttatccatacttatcaagaacggacttttagaagaatctaatagtaatacgattttattactttacattcagaagtttagacgcaaaaaaagtgaatatttataagaaagcttacttagcttcctcaattatcgtctttactcctttaattttctcaccttgtatcaacgtgagcaactgtttcatcttactacggcgcacagcaacgaaagcatagtgttctttcacatccacttgtcccacatcttcacgcgccagtccacctttcttatataagaagccgacaatatcgactttgttcagcttatctttctttcctttacctatatataaggtagcccatcgggacttggccggcttcggcagtacttccggaaactcaaagacttcaatatcttcgggaatgtattcaggaacccgttcttcattgtgcaggatgagataggaatttccatcagcttcccaacgagccgtacgtccgttacggtgcgtataggcttcttcattgacaggaagatgataatgaactacgttttctataccggggatatccagtccgcgggcagcaagatcagtagagatcaatacggcacaactgccgttacgaaacttatagagcgcccgttcacggtcgggttgctccataccgccatggaacatatcgcatgggaatttctttgcttgcagatatccggtgactcgttccacactttcacgatagttgcagaatacaagggtagaatgatagccaagcacacaaagcaggttatagagagtttccagcttgtctttttcgggagaaacaactttatgaagtttcagacgcggtgcaagggcatcagggtccaggaaattcagtttgacaagtcgagaactgtcagcagaaagttggtcctcgcctcctactccggcaaattgaggaatttcttcagcatccgtagccgaaagcagaatacgcttctttaatgacggtaactgtccgatcacttccgccatttcatcgtggaaaccgaactcaaggcatttatcgaactcatctatcaccaatgtggtgacggtagccgcatcgaaattctctttccgcagatgatcgttcattcgtcccggcgtaccgataatgacggaaggatgaatccccttcatcgtcctgtgctcttccattgcaggacgaccgccgtaacaactcatagctttaaacggggtccccatggatttgaataccgtttcaatctgcaatgccagttctcgtgagggcaccagaacaacggcttgtacgccttgcgcctccgttttcagagtctgcaccagcggaagcagaaaagccagcgttttacccgatcctgtgggtgaaagcaacaccaagtctttattttcacggtaagcttcccgggttgcctcttgcatcggggtaagttgctctatttgcagattacgcagtatatcttgaatttccataataatcttttgttatgacgagccaaagataatgcaaattgggcgtagaactttcatgcatgtatgaaaaagttaataaaaaaactcctgctcagccgtagccttgcaggagttttcaaaaatatcgaagtcatttaccaattttagcgtatgccttatccgccgaagttgtcgaacatcaagttctgagccggaacgccgagatcgtcgagcatcttctcgacagctttcgacatcgggccaggaccacacatgtagtattcgatatcttcgggagcttcgtgattcttcagataagtttcgtaaatcacctgatgaacgaagcccggagtatacttcacgcctgctgcatctgctgcgggatccggacggtccaaagccagatggaacgtaaagttcgggaaatccttctcgatttgcaggaagtcttccagatagaacacttcattcagcgcacgtgcaccgtagaagtaagtcatcttacggtctgtagtatgcaatgtcttcgtcaagtgcatgatctgggcacgcaaaggagccataccggcaccaccgccaatccacatcatttccttcttagaatcgaatatcgggtggaagtctccgtaaggaccactcatgattaccttatcacccggtttcagtgtgaaaatataagaagaagcgatacccgcaggtacatccataaagccttgtccctgatctttcggcttgaacggaggagttgcgatacgtactgtcaacatgatacggtcgccctctgccggatagttagccatagaatacgcacggatggtttcttcgttgttgtcacacttcagtgtaaacaaaccgaatttctcccatgccggcagatactcgtcaccaatcaggctcttgtcaatgtccttgttatagtccattgagtatttaggtatcttgatctgtgcataagatcccgggataaagtccatgtgttcgcctttaggcaacgcaacgatgaactctttgatgaacgtagccacgttcttgttggagataacctcgcactcccactcttttacacccagtacagactcatcaatcttgatgcccatatcactcttcactttcacctggcaacccagacgccaatgatcttgcacctgtttgcggctgaaatgaggaacttcagacggcagaatctcgccaccgccatccagtacctggcatttgcactgtccgcaagaacccttaccaccacaagcggaagaaaggaatataccgttcacagacaacgtattcagcaacgtggaaccggaagctacgtccagtacattatcgccgttgatagtcagttttacattacctgaaggtaccaggaagttcttggcaaccagcaggataacaacaagcagcagaataaccaccaggaatactccaatgctcgctaatattaaattcatatccattgttctattcctttctttattagatgttcaaaccagagaaacacatgaatgccattgccatcagacctactgtaatgaacgtgatacccaagcctttcagcgcgtcgggcacgtcagagtaagccattttctcacgaatagccgccagacctacaatggccagcaaccagccgataccggaaccgagtgcataagagatggcatcccatacgtcaccgatgtatttcggatcgctctcgcccacattgatacgttgctgcatgaacagcgaagcacccatgatggcacagtttacggcaatcagcggcaagaagatacccagtgaagcatagagggagggactgaaacgttccacaaccatctctaccaactgcacgataccggcaattaccgcgatgaaaagaataaaactcaggaagctgaggtcaacgccttcaatgatagcgttggcagccagtaccttggtttgcaacaagtagttgaccggaagcgtaaccaccaacacgaaagttacggcgatacccagtcctactgcggttttcacgttcttagatacagccaagtaagagcacatacccaggaagaacgcaaatatcatgttgtccacgaatatggagcggacaaataaacttattaaatgttccataatctttattgatttatgaattatgatttatcggttatgatttatcagcactataagtagcagaaaataaatcataaatctgaaatcataaatctacttacttttcttgcaattctttgtgacgggcacgttgataccagatgatacaagcacagatgatcaaagccatcggcggcatcagcatcaagccgttgttcacataacccaggtttgtcagccattcatggttcagaatattgaaaccgagcaatgtaccggaacctaacagttcgcggaagaaagctacgataatcaaaatcttggcatatcccaaaccgttacctataccgtcgagacaagactcccacggaccgttctgcatggcaaacgcttccagacgtcccatcaggatacagtttgtgataatcagacctacataaacagaaagctgcacacttacgtcataagcaaacgccttcagtacttcacttacgatggttaccaaagcggctaccacaaccaactgaacgatgatacggatacggttgggaatggttttacgcaacaacgagataaccacattagagaaagccgtaatcactgttaccgaaagccccattacgatggcaggttccagtttggcagttacagccagtgcagaacagatacccagcacctgtacggtaacagggttgttcatgcccagcggggttgagaatacttctctatttttctttgaaaataactgtcccatatcctttattcctcatcattattggttaaaaaactcttgtaactattcagacaggttttcaacataacgtctacacctacagatgtaatcgtaccaccggagataccgtccacctggtaatcaggtttttccaccttaccgttcttcacaacacccagggcaacttcaccattgtccagcgtcttcttgcccaggaattcatcctggaattgttgtccggcgatttcggcacccagacccggagtttcactggcatgagagaagtaaacaccgtaaacggtatccttgtcactgttcagtgcaacatatccccagatagcaccccaaagaccggcaccgtaaacagggaatacatatttggtttctccattcacttctgcaacgaatacgtgcaggcgttggtgttctttagcttctttttcgtagccggtagcaaatgctccggtgttctcggtcagagtaccgtctacgttcatcagcatatctccttttacatacttattatattcagcctcggcatcttccacattcttgatgttcaatgcagcgagtatttgcttcttcgtatccagttccacgtttttatcctgaatgcttctcagtgaggaactaacgaatgccagcaagaatgccacgataacaaccattaccgaagcataaatgatagtataactattactattggtattcattttcttcggtattttaattgttagacttaattgcacgtttctcgcgacggctgatattgccctgtactacacagtagtcaatcagcggagcgaagatgttcatcagcaggatggcgagcatcataccttcgggataaccggggttcagcacacggatcacgattgccatgacgccgatcaggaaaccgaagatatacttacccgtctcggtacgtgccgaagttacagggtcggtagccataaatacggcaccgaagcagaaaccacccagcacgaggtgttcgtaccaaggcatctgagccatcggagtgtcaggaccgatagcgttgaatacccaagccatgaacgcaccacccacgaatacggagaacatcgtcttccagcttgcgatacccgttgccagcaacaggatagcacccagagcgatagcaattacactggtctcaccgatagaacccggtatcaagcccgtcaccatatcccaggagaatggcggaacagcccccgatgtggcagccgcacccaacggagtagctacggtcagtccgtcaaccgcttgtcccagaccgaagattgtgtcgcctgatacccaaacggcatcaccggacatcttcgtaggatatgcaaagaaaaggaatgcacgagtgaccagggcaacgttgaacacgttcatacccgtaccaccgaatacttctttagcgaaaattacagagaatgcagtagccaccgccagaatccacagcggacaatctaccggaacaatcataggaatcaggataccggaaacgaggaaaccttcctggatttcttctttcttccactgagccacaacgaactcaatgcccaaacctactacataagaaacgatgattttaggcaatacagccagaaaaccgtaggcaaacatttcaatgaagctacctgtagcaccggtattcgtgaaatgctgataacctacgttatacataccgaacaacaacgccggtaccaacgcaatgaccaccatcgacataatgcgcttgctgtcgatagcgtcgtgaatgtgcgttcccgatttcgaagtcgtgctggggacgaacaggaatgtttcgaatccgtcgaacacagactggaatgcgtggaatttgccgccctcttcaaagttcggctttatcttgtcgagataatttcttaacgctttcattaattttttagtttattagttttttagtttataagtttttcagttttcagtttgcaagttttttaagtgggacatcttctggtcgcaacaacttaaaaactcaagaactcaaaaacttaagaactcaaatttacgccatttcggcgcgaagcatgtcgagtcctgcacgaacgatacgttgaacttctaccttcgaagagcaaacgaattcgcagagggcaaaatcctcgggagctacttcgtagattcccaaagcctccatacggtcgatgtcacccgcaatgatagctttcaccagatattcggggaagatatccatcgggaatacacggtcgtactcattggacatgatcatgtggcgttcaccacccttgatgcgggcatccagcacatattccttgttgttgcccagcaaccagctgaagtaagaacggttcacgctgaactgattgaaacgcggcataatccaacccagcatttcgtggatgtcatcgccttcggggatcaccgtgagctggctgtcgaatgcgccgaggaaagcgttcggagaaaccttcttgcctgtaagcacattaccgctgatgtagcgcaagtctcccttgcccgagctcacgtttccactgaatacgtttgtcagcaaagcacctactttcagtttgcagtatgcaggtttcaacacttcggaacctgtaacggccaccttgcgcgtcatgtccacacgtcctgtattgaacaggcgtccgatgaatataacagcttccggactgattgtccacacagtttcgcctttcacgataggagaaatgtggttgatctgtacgcctacattgccggccgggttcggtccgtcaaatgcgttaatcgttacattcttagcttgcgtcaacgcggttgccttttgttttacactaatactcagatacgtctttgccatcttggaaagagcatccaatcctgtctggaagtttgcttcctcgcctttcagaacgaattcgaaatcgggtgccagcgggttactgtcgaaggccgaaacaaagatagctttcggatacatcgtggggtcagcaatcacgtcatagggacgctgacggatgaacgcgaacatacctgcttccagcaatgcggctttcactgactcgccgttcagggaactcacgtttttcttaccgaattcttcatagtcttgctcagccgcagcttcaacgacaatgttcagcactttacgacgtgcgccgcgctccacacttgtcactacgccgctaacgggcgaaacaaatttcaattcaggatgattcttgtcgataaacaagggtcctccggccatcacatattcctgttctttgactactaccttcggagtaatacccgtaaaatcttcaggaaccaatgcgtagaatcccggttctttcacagacataaactcctgagaagccttacctttcaggttgatgtcaaggcctttacgtaacttaattacatttgccatgcgtttatataaaataatggtttcattaatttgccgcaaaagtagcaaaaaagaacgtgaataaagagcaaaaaagaaaggaattacggataaatttccgtaattcctttcgttaacgaacacgatgacaacaagatgagttattgtgtttaatattcttctgcaaacatcggatcccaggcgggcaaacgaatgggtttctgcttgaatatatccattactttggcaggaacgtatttagtctccagcaccagacggaacatatattcgtcgaaccattcatcggtcatgatcagatgtccctgataaccgctggcaggtccccaactattttcaaccatccatttcacgggttttccgtctttattcagatccacagccataagggtcatggcatgagacgagccgctggagaaggtttggatgcgttgtttcttatccatattgaaggtggtgcccatgagcgattcataatcatagtttttcacatcgagcaagccacgctcggaattcaggaacttgcctacgtcgcaagagaaatacatcatggtgctgtccttcagagaagcgatagccatctctttgatatcttccacaggcagattgacgtacgtccagttcttcccatcgtagcgatgacggtcgtaatctatttcatagcacttgtagtactcgcgcgagggatcgttcataaccatcacataattggtcaacagattctcgtcgccatacttcttgagaaatgacatcggagtgtgacgttctgtttcggcaggattgccctgggcatctttacgcacatagtcaaattccgtaggaggaacgccaagattcagcaccagcatgcgatagatggtaccgagcatcgcagtcttttctttatccagcgccgcaggttttgctccgttagaagccagatcacgcagttgcagaccgtattcctttaacttcaaagaaatcagatttgccatacgcgacgtattgtcgctgctattcgtttccggcatggcttctttaggaaccaaaccatatttacctacaatgtctgcaacgcccgtaaaagttcctccatcgcttagcggatgttggaaaagccattctacggttttatcgttcaagggtttgtcacgggtatcaatgatgccttgcagaaagaggtttgccttctccagctggtcccagaaaaaaggataaatttccgagaattcaaaagactggaaaccgtatttaccgatggctttggcacgcatcacattcagtcctgtgaaaagccagcaacgaccggatgatttctggtcggtgatgcctttcgaatttacttttacggagaaatgagtatccattccggtcagattctcctggttgagggcaagtttgcggatgtcattgttgccaatggcattacgcagagctttgtcggcactggttccctcgtaactctgtttgatctggttcagcatcgcatcgctgataccgcctttcctatcttgcgcctgtatggaaagtaatgcggcgctgaaaacaaaaacggataaaattcgtttattcataaattatatggtttttatagtaattggtctgtttctcttgcttcctgttacccgaaccgtaccaaatccgtgtttgctccgtatctaagactttggacttggtacggaccaggtacgggccagacacggaccgggtacggaagggctctgaatattggtctaattatccgatatgtcgaaaaaacttatttagaatttctcatagccaagcttcagattacatgcaaaaatagccgtttttttgaaacttttagtgaaatctttagatttattgtctatcaatttgaaaacttatccaaataaattagttttctttgcaccctcattcgcacgatatgaagaaatatataataggtattatgacgttactgctttcagtaacaagcctttccgctcaggaagctacaaatttggttagcatcagtgacactacaccggcattgactaaacgtgaactacgaaaacagaaggtagcgcaacgaaatttgcactacaacattctgggtggtccgagttatacccccgactttggtgccgtactcggtggaagtgccctgatgaccttccgcatgaacccaagtgacaccacacaactgcgctccgtggttcccgtagccatcgctttcctcttcaatggcggtatcaaccttttctccaaaccccaactcttttttaaaggtgaccgtttccgcatcttcggaaagtttgcctacaagaatacggaagataacttctatggtttgggctacagcacgaacaagaattatgtccggagcgacactaccagtcagtatcgctacagcggcatccagttcaacccctggttcctgttccgcctgggcaacagcaacatattcgccggaccgcagatagatataaattacgacgacatcacgaaaccagccaaatatctggtggacgaaccgtcgtacaaagcagccggaggaacggacaaaggatacaagaatttcaattccggtgtcggcttcctgctgacctatgacagcagagacatccccgccaatgcctatcgcggcacgtacctggatttccggggaatgatgtatactaaatttcttggaagtgatgacaatttctatcgtctggaaatagactatcgacaatataagactgtcggtaagcgcaaagtcattgcctggactgctcaaagcaaaaacgtattcggtgatgtacccctgacacaatatatcctgacaggaactccttttgacctgcggggatattacatggggcagtatcgcgataaatcgtcccacgtagtcatggccgaataccgtcagatgataaataccgataaaagcacctggctgaaacgcatgctcaatcacgtcggcttcgtggcctggacaggctgcggattcatgggacccacccccggcaaaatagaaggtgtgctgcctaattatggtgtaggattgcgcatcgaagtgcaaccacgtatgaacgtacgcctcgacctgggtaaaaatacggtcaacaatcagacgttgttctatttcaatatgacggaggcgttctgaaaggtatggaaatgaactaaatgctgataataattttaggcgcggattacacggattacgcggattaaaggctgcgctatcacactatattacagaaaataaatccgtgtaatccgcgcctaaaattattatcatgacccgtttacaaacaaacaactcacgccagcatctccccccccttatcctttccgttatttatttttctctcttttcttgcatcagtaaaagattatccatacttttgagaaatattttgtttaccttgaacaaacaactctgaggacattacacaatgagaactttcgagatattattctggataagcctgtttatcgtattctatacttatataggatacggaattgtgctatacattctggtcaaaattaaagaaactttccgcaaaccggtacactaccccatgcctgctgacgaggaactgcccgaagtcacactcttcatcgcagcttacaatgaggaagacgtggtggacgaaaagatgcagaactgcctggcgctggattaccccgcagacaaactgcaaatattctgggtcacggacggcagcaacgaccacaccaacgaacggctttcccactggccccgtgccaccgtcctccaccaacccgaacgacaaggaaaaaccgccgccctcaaccgcggaatgaagttcgtgaaaacaccactcgtcgtattcaccgatgccaatacccacctgaaccgggaagcattgcgcgaaatcgtccatgcttttgtcaaccccaaagtgggctgcgtggcaggcgaaaaacgcattgccatgcaaagcaaagacaatgccgcatcaggaggagaaggcatttactggaaatatgaatccaccctgaaagcactcgactcacggctctactcagccgtaggcgctgccggagagctgtttgccgtacgccgggaattgttcgaagacatgcggacggacacactactcgatgatttcatcctctccctccgcatcgccatgcgtggctacaccatcgcctactgtgccgcggcttatgccaccgaaagcggctccgctgatatgcaggaagaagaaaagcgcaaagtacgcatcgccgccggaggcttacaatccatctggcgtttgcgcccgctgctgaatcctttccgctacggtctgctcaatttccaatacgtatcccatcgtgtcttgcgatggtccatcactcctatcctattgttcctgttgctccctctcaacgtagcgctacttttcaccaccgcacaaccattgttctacgccgttatactgggactgcaaatcttgttttacctgatgggaatctggggatatatcctttccaggaaacacatcaaaaacaaaattcttttcatcccttactacttcctcttcatgaacgtcaatgtgctaagaggattccgctacctgagtaagcgcaaaggcaataaaagcggagcctgggaaaaagcacgaagggcaagttaagacggaaatacctcgacaaaaatctaatacaaagaaaataatgaaaagcattctgaaagacacaaataactccgaaaagctattgaacatggtatcagacaccctgatactcatggacaaggacggtgtttgtgtagacatggccgtacacaacgtagacctatggtttatgaacgaagagagattgctcggaaagaatctgctgaacctgctacctccggtgacatacagtgagttttatcctgaattcaagaaagttttgctccggagaacaaagtctgtccgcaactacgaactcatgttgcgggatgacacgtatttcttcaaatgcatcatgcaaccctacggtgacctcgtgctttgccaataccgggatatcaccgaacgcagccagcgcaaactggagctggaaagaagaaaccgggaactatatgagatacagaaagccgcattcatcggcaggtgggtgtttgacacggccacccgcgaattcggttatgccgggcatacaggcatcatgtgcaagacggatgagcaagccattccactggatgcatacctgaacctgatcttgcccgaagacagaaatacttttgagaactggctcggcgataatctgaaaggtaacatggaaaatactgtggactaccgcattctctacaacaaagatgtacattacatccgcctgaaaacattcagtcgcgaacgcgataaagacggcaacatctcgctggaaggatacatacagaacattactgacatccaaaaaagccgcaatgacatcaacctgctgacgcacgccatcaacaattccacagaagatatcttcgccgccaaggaagacggtaccctgatttttgccaaccgcctcttcaagctgcaccatgagctgggaagtacggatgacatcagccaactaaaaatatacgaaatcggctcgtacgcccgtaccctggaggggtggcaacagatgatcgcctcaatcaaaaagggagagaaacaccagtcttttactgtatacaaccccttgccgcacttcccggaaatactggcatacgaaggcaatgcctattgggtgaccagcgatgaaggcgtaggaaccatctgggctttcggccgggacatttcacaacgcatccgccacgaacagcagatcaagtggttcaaccagatattggacaaaaccatggagcatctgcccgcaggaattgttgtgaaagatatcaggaacaacttcaaatacctgtaccgcaatcgtgaatcgtacaaccgtgacgtccctatggaagaggctttgggcaaagacgatttcgatttctatcctctcgaaatagcccgtgagaaacgccggcaggacaaagatatagccaccaccggacaagagatgcactggattgcagaagaacgtgacggtcatggaaatccgcttttcctggacaagcggaaaatgaaaatagagagcaaagacttctcccccatcctgctgaacatagaatgggacatcacagaaatggaactgatgaaacgggaactgatggtagccaaagagaaagccgaaacctccgaccaactcaaatcagccttccttgccaacatgagccacgagatacgtacaccgctcaatgccatcgtaggcttttcacgcatcattgccgaaagcgaaaatacggaagagcgcaaagaatattacaacattgtggaagccaacaacgaacgtctgttgcaactcatcaatgaaattctcgacctctcgaagatagaggccggaattgtggagttcagcatcgccgccgtccgcctgcacccgctgtgcaaggaaatccatgatgcgcatgtattccgctgtccgtcaggtgtagagctgatattcgatccatccgacgaagatattctgatagactctgataagaaccgcatcttccaagtgatatcgaacctgataggaaatgcgttcaaattcaccaccaaaggcagcatcagctacggataccaccgggaaggggaaactatcgtattccatgtgactgacacgggcacaggcatcgcccccgaaaagataggaaaggtattcgagcgttttgtaaaagccaacaattttgcacagggcaccggattgggtttagccatttgcaaaacaatcatcgaacgtctgggcggaaaaatctccgtgacctccgaactggagaaaggaactaccttcatctttaccctgcccgccaagaccacccaagacgaagataaggaaaaaactgaaaacagccccgaagaaaacaaaacggtagccggagaacaaagtgcaggcagcgaaagcacggaaaatgtacaggcatcgccacaagaaaccgtctcgctgaaaaccgttttgatagccgaagatacggatagcaattatatcctgaccaaagctattctggggaaggaataccatctggaacgtgccaaagatggtatggaagccgtcaatatgtttgtagaaataaatccggatatcatcctgatggacatgaagatgccgaacctggacggactggacgcaacaaaaatcatccgggaattatcgcccggcgtccctatcatcgccctgactgcctttgcctacgatcatgaccgcaaagccgcactcgaagcgggttgcaacgatttcctgaccaaacctttcacacaggagaaattgaaggagacgataaagaagtgggttaataagtgattaacccacttatcactaatcacgcaaagatatcgcttctttgaatataggcaatcacatcgcccttattcacagtatcgccttgtttggcgcatatctctacgacgcgtccggtgaatccggtcaatatcttttcgtattctccccagggggtggagaggtaacagaacacttcatcatgctgatatttacgccctatgaacggagccacagaaggaccttccacagatacttcccacaacacctgtcctttatccggtgcaataatcggatcggccttggcacgtttcagtttccggatttcttcttccgaatatccattcttcaccatagacgcgtctttggcacgttgcaattcatcctcgaaacgcttcttggctgtgccggacttgtaatcacgatactgacggtcgtgcatggcaagttcaaagagttcttcttcatcatctccatattcccaaccgttctcgtccatttctttccgatattcatccagagcatccggatagttcaattgcggatcggtatccacaaattcatatccttttgatttcgccaattccacaatctcaggagccagctcgcccggcagacgtccgctcttaccgagaatcatatcccacgtatgattatctatcatcgtccagcgctcctcacctttcaccaactgcatgaggttcatcaatgctacattcttcacatactgactgaaaggcgttaccaacggaggataccccagcttaggccatacgtattccacctcgtcgaagagcatcaccaacaggtcgtcaatgctgagttccggttcattcttccctcttaatatcatgtttatacccgaatgtactcccttcagatcagccatcatggaacccatcataccacccggaaggccacacttcaacagcaaagaggacatgtgtttattggtcggatccatgaaatagcccaggaagtcatctataaattcctgtgtcatggcacgtgctttcatatatgccttcatattgatatcgggcacctggaagcccttatctttcagcatggcttgtacggaaatcacgtccggatgtactttaccccaggacatcggttccatagccacatcaatgatgtcagcgccattctcgcaaacttccaggatagaagccatcgacagccccggtccgctatgtccgtgatactggataatcacttcgggatgcctttccttaattgtcttcgtcaaccgtcccagcatacccggacgaccgatgcctgccatatctttcagacagatttcgggtgctcccgcttcaatcagctggtcggcaacatgggcataatattccaccgtatgcacaggcgagtgtgtgatacaaagggttgcctgcggtatcatccctgcctccaatgcatatttaatagaaggaattatattccgcgtctcgttcagtccacagaagatgcgggtgatatccaccccttgcgcatgcttcacacgatacatcagacggcgtacatcggcaggcacaggatacatgcgcaaagcgttcagaccacggtccagcatatgcgtttgtatgcctacttcattgaaaggtttggtaaaagcgcgtacggctttgttaggattctcaccgtacaacagattcacttgctcaaaagctcccccgttcgtttccacacgggcaaaacaccccatttcaataatcaacggagcgatacgtaccaattgatctacacgaggttgatatttaccggaagattgccacatatcacggtaaacaagactgaatttaatttcctttttcatcgcagtcaacagttagcggtttaacatatatgaattactcggttaacttaacaagtacaaatataaaggtttattctgacatatagtcaaacttatatttgaattatttagaataaaagatatgtttaatatcacattgaaacttatttttcattttataacatttctcgtcatttcattcctctatgattcagacgataatttatcggaaaggatggaggggagtaattatggtacagtaatgaactaaatgctgataatgatttaggcgcggattacgcggattacacggattaatggctgcgctattacactatattacagaaaaagaatccgtgtaatccgcgtaatccgcgcctaaaattatattcataccggtataggaatgaataagactcaccacagattacacagattcacacagatttattaatctaataatcagtaaaatagaatctgtgtcaatctgtgtaatctgtggtgaattaattcataaccctgtagaaaggaaccaatcccatcacaaaaaacatgcccagagcattgccctgggctataaatattaagtttgtcagtcttcagtctgcactgtttgttttcaaacaaagtctttcagttcttgttgtagccgttggcgggtaaagaagatacggctttttacggttcctaaaggcaatccgagacggtcagctatttcacgatacttgaaaccggagacatgcatggagaaaggaactttataatcgcggggtaacgaattcacgatgcgatgcatttcttttaaatcataagatccttcggcatttgcaaaaccggagttttgcggcaggtttaagtgataaaggttatctgtctggtccacgaaagtttgttcgcgaacgattctgcggtaattattaataaagatattccgcataatggtgtacatccaccctttgaaattggtatcgggcatgtacttgtcttcgttgtccaatgctttgagtgaggtttcctgcaataaatcattcgcctcctctttatcggctgtcaacttatatgcaaagcgaagcagttcttcttgcacactaatcaaatccttcttaaaactgtaggtattcatactttgctcttttaaatagttaataattattttaaattcacggttgcaagtatagggaagttttggggttcccgaggaccgagttttgtttttatttagggcaaaaactatcaattgacagttttcaccccctttttgagagttttctggtggtgatttttgtaaaaagcgtatctttttccgaagatttcgtaaactgtttgtgatttttttatagttttgcctacatatagcaaaaacactttatttaaaaacactttattttatgagacgaattattaaatcaatcactcttctggctatcatggctatcgctttgccgtcattcggtcaaggattgaaagctttcaagctgaagaatggcctttccgtatatgtatgggaagacaacacgaaatcggatgtgtacggtattgtggcctgccgaacaggttcagtgaacgatccggcagagtacacaggattggcacactatctggaacacgtgatgtttaagggtaccgacaaaatcggtgcactggactgggctaccgaaaagcctatttatgataaaatcattgccaagtacgatgaaatggccgacgaagctgatcccgttaagaaagaggcaatcgctaaagagatcaacgagctgaccatagaagccggaaaggttagtgtatccaacgagttcatgaacctgatagaaagtatgggtggaaagagactgaacgccggaaccagcttcgacgtaacttactatcacaactcattccctccctaccagatcaacaaatggttggaaatctactcacagcgtcttatcaacccggtattccgtaccttccagactgagctggaaagtgtatacgaagaatataatatgtataaagataatccgggaagcgtacagcaagaattcatttcgagtgtcgcctatgaaggacatccgtacgcacgccccatcatcggtctgccggaacacctgaaaaaccctcgcctgagcaaactgatcgaatactacaacgaatggtatactcccgaaaacatggtactcattcttgtgggtaacgtcaatgccaagcaaatcagcggacgtatcaacgccactttcggacgtttaccggctaaggctactcccgaacgtaaaacttatcctgaccttgaaattaaaggtcgcaagcagtataatgctaaaatcggttattaccccaatgtatgcctcgtatacaaaggtgtaccttccggacaccccgatgaaaaacctctggaaatcgccatgtctttgctgagcaacagcagcagcaccggtacgctggacaaattgaccatcgacggtgaactgaccaatggttatgcctatgcagacacccgccgcgaacaaggccgcaatatcgtacgttgcacaccactgtacgatgaaaaccaacgtcgtttcgaatcgaacaagagcgctgaaaagaaagcactgaaagctatcgagaaaatcgccaacggacaattcgaagaatggcagatcaatgctatcaagaacaatatgtgtcgtgacttcgacctgatgatggaatcgaatacttccaaagccctcacgctgatgcaggcctttatcagtgaagaagacctgggacaagttctcaactacaaagatgaggtaatggctattaccacagaagatatcaagcgtgttgccaaacaatacctgaccaacgattacctggccatctacattgaaaaaggcaagctggacaagaatgcaaaaatcaagaaaccgggttacaaacccatcgaaccgcctgtaggcaaacaatctttgtatgctacacagttcaagaatatgcctatcggacaagtggaagagaaattcctcgacttcagcgagatacagagcaaacaactgaatgaccgctccaagatgtattattcgcagaatccggaaaacaacgtattcagccttacactccgttatggtgtcggagtacgtgatttcccgaaactgggtattgcagcggacttgatgaacaacgccggtatcatgggtacttatgagccgcaacaactgaaagaggaacttagcagactgaatgcaacttgccgcgtaagcgccagtcaaaactacctctacatcaccatggaaggctacgaagaaaccttgccacaagcttgccagcttcttgcccgccaaatcctgatgccgaaactggacgaaaaacagttaagccgtatcaaaggttccatgctgggcagccgccaacaacgtaaggagaatgtaaacaccttatccaacgcactcctccaatacatgatcttccaggataagtcatcctatattgacgaactgacagataaggaaatctacgaattgcaaatctccgagctgacaggtgatatcaaccgagcatccaactatgaagccgaaatcttctattgcggaacaatgcctttcgataatgcttacgacgtcctcagcaagaatctgccgctggttgccaacgaaaagccatctacatctccgcaggacaagccgatggtttcagtaacggaaaataccatttacttcctgcctaacacggatgcggaacaggcacagatttatttctacctgccgatggcaaaatatgataagaaagatgatgcaatacgcgatgcgttcaatcaatatttctccggtggtttcaacggtttggtaatgactgaaatccgtgaaaagcgttctatggcttactcagccggagcctacatcggaactcctgcattgcccggtaaccccacttacctgtttggtaacatcggtacgcagaacgacaaagccaatgacgcgctggatgtcttcatgggattggtaacggatatgcctaagaatgcagaccgtatcgataacatcaagagttacatacgccaggaaatgctgacaactcatccttctttccgcgataaagcagagaacatgagagaattgcagcgcataggttacaatgcagaccctgccaaggagaacctgccaaaggttgacgcattgacttttgacgatatcgtgaagttctacgaagagaatattaagggcaaaccttactgcatcggtgtcatgggtaacccgaaagatattgatctgaagaaactggagaaatacggcaaagtagtgaaactgaatgagagaaaattattcaacacgaaagacgcattgttctaaagagctacgagtttctgcgctatgacgctgaaagagctacgagttacgagctacaaactacaagttgctgcgctatgacgctgaaaagcacttgtagctcgtagctctttctttattactccttgtcttcctcctcttctccgcctcccgtaagaatcggcagacagatattatacttcactgccagaatgcgcgtcacaaagaccgatactccgcccaccacctggcaagcataggactgcattcccagcagatcgcacaaccagtaggccgtaccgcctaccacacatgccatcgcataaatctcttttcggaaaataagcggtatctcattgataaacacatcacggatcactccacccgcagcacctgtaatgctacccataatgatggctacccagaacggatatcccaatgcaatgctcttccctacaccgaccaccgtaaacagtgccagaccgatactgtcgaagataaaaaacgtattgtgcaagtggatgagatgctttccgaaaagaatgacccaaagtaaagccagtcccgtacaaatcagatagataggatcagtcatccaccccggtgtcactcccagcaatacatcgcggatggtaccgccgccgatagccgtcacaaaacctaccacgtacgccccaaaccagtcgaaccgctttgccgatgccagacggataccgctgatggcaaaagcgaacgtacctataaaatcgagaatttgaacaaatgtaggcatgataatcaatgattaacgttaaatgtttaatgatttataatcggtattcattaaaattatgggcaaagtaacgaataatttccctaagaaaacgtatttttgtctcatcaatttatatgcaatgaaaataacaatcgtatcgggcgcacgccccaacttcatgaaaatagctcccatcacccgggccatcaaagccgcgcaggaagctggaaagaagatttcataccgtctcatctacaccgggcgacaggatgataccagtctggatgcctccttgttttccgacctggacatgaagcggccggacggttatctgggagtcaccggacacgaccattcggaagtggcagccgccatcatgcttgctttcgagaaggaactgaacaatcatcccgcgcaggtagtactcgttgtagacgatcttaccgccaccatgagctgttccatcgttgccaaaaagcgcggtctgaaagttgcgcacctcattgccggaacccgttcgttcgatatgaatatgccccgcgaagtaaaccgcaccatcgtagatgccatttccgactatctgtttaccgcaggcatggtagccaaccgcaacctgaaccaggaaggcatgattcccgaatacatccattatgtaggcaatatattgatagataccgtccgctacaaccgtcaccgtctgttgcagcctgtatggttctccaccatagggttggaaaagcgcggttacctgttgctgactctcaaccggcacgacctgctgaccaagaaacatgttctcaaatcgttgatacaaacattgattgagaaatccgaaggcatgcccatcattgcgcccctgcacccttatgtgcaaaaagccatcaaatcgctggacatccccgcgtctaatctgcacatcctgccgcctcaaagttatctgcatttcggttacctcatcaaccatgcaaaaggcattgtgacggactccggaaacattgccgaggaagctaccttcctcgatgtcccctgcatcacgctcaactcctacgccgagcatcccgaaacctggcgtgtaggtaccaatgagttagtgaatgaagattccgtggctcttgccaatgctctggaaagattaatgctcggcgaatggaaacatactaccctgcccgaccgttgggatggacgtacagcggaacgtatcgtacagacgttgattaacggagaattaaaggagcattactgaattaggagttaagttagaggaattaaacagataaccaacagaaataacctaacttatagaaagcgaaaagccgtaaagaggggtgttttccagtcaggttcttttccaaaagactctcagatatacgaaataggaaagcggttagtgcaacagcatgaaaccgctttaaacaattgtaccagcgcaataagcggacataaggaagcaattcccgttcacgacccaagaggtttttcacagaacggcgtgttttcaccaaaaaagaagccgcatcttcctccaccagatgccagaccggattttcaatatgcaacaccgatatgcccgcatcttccagcctctttccgaaagcggtatcctcatatcccagatgaaacgtttcgtcaaaacggacacgcagaaaaagctctctcggaataaaaaagttcatacttataaagtgctgataaggatgcttacgacgttcggcagccggttgcgcttccacctgcgctccgtatttattgcgcagaaaggagtccccctcctccggataacaaaagccaccgcaaaccacctgtccgcccgcattcttgaggtataaagaaagaaagtcctcacctaccggacttgtgtccgtatccagaaaaagcaaataaggataacgcgcctgttcacccaaataattgcggataaatgccggaccatgattcgtctccagttccaacacacgacatccgtccaaccggttcaacacacgattttcttccctcactttccggcacgacgcgtcgtccgccagcaaaatttcgaaaggaaactccgtcagcaaggccatctcatataatttccgaaccaacgagacgcaatttatattatacaccggaatgagtatggacagcatattgtgaattttacgcgacaaatatagcacaaatcagatgaaagttaaagcagatataaacattcctcttatttctttagattatatttacttcttatttaactgtattttgttaactttgcggcctcatactgacttaaatatgaaacaacaatatatagctctcatcctttttctgctgtcattattcgtcgcacacagcgcatccgcacagattaaaggtgtcgtgaccgactccctcaccaatgaaccattaatgtacatcaccgttcaatacgagggaaaaggcgtgggtgccatcaccaatgccgaaggcgaatacacagtggaaacccgcaaaggctggaatgaattatcattctccgctatcggatacgtgaccaagaaagtcaccctgaagcccaccaccaaagtactgaacgtgaagctggcacctgccgacgtcatgctctccgaagttgtggtgaagccccaaaaagagaaatactcccgtaagaacaatcccgccgtggattttatgaggaaagttatcgagaataagaaagaactgaaactggaagccaacgatttctaccagtatcagaaatacgaaaagatgaagatgtccatgaacgacgtcacccccgaaaagatggaaaagggcatctacaagaaattctcattcttcaaagaccaggtggaagtatcgcccaagaccaacaagatgatcctccccatctccatcaaggagacatcttcgaagaccatctaccgcaaaagtcccaaaagcgaaaaaaccatcatcgaaggtgtgaattccagcggtatagaggagtttttcaatacgggagacatgttgggcaccatcctgaccgatgtcttctccgatgtcaatatctacgacgatgacatccgactcctgcaacgccgcttcgtcagccccatcggtcgcggggccatcagtttctataaatactacctcatggacaccgtcatggtggaccgtcaggagtgtgtgcacctcaccttcgtgcctcaaaactcacaggatttcggtttcacgggacacctctacgtagtgaaggattctacttatgccgtaaagaagtgtaccatgaacctgcccaaaaagaccggtgtgaactttgtggacaacctcgacatagtgcagcaattcgagcagatgccggacggaaactgggtacttacggacgatgacatgaccgtggaactgcaattcgtaaaaggcatacaagggcttgaagtgcagcgtactaccaaatactccaattacaactttgaagacattgagcctcgtctcttccgcctgaaaggtaacgtcatcaaagaagccaacatgctcaacaagagtgatgaatattgggcgagtgtgcgtcaggttcccctcacaaagaaagagagtaacatggacgtcttcatgaaccgcattgagcaaattcccggattcaaatatgtcatcttcggtgcgaaagccctgattgagaacttcgtggaaacgggcaccaagaagcaccccagcaagttcgacttcgggcctatcaataccaccatcacaagcaattacgtgaatggcacacgtttccgtctcagtggtatgaccaccggtaacctcgatccgcactggagtttcagcggatatgcggcctacggtacgagggacaagaaatggttctataaaggtcaggcagcctactcgttcaacaagcgcgaatatgtattgtgggaatttcccaagcactacctggccttcgattacagttacgacgtcatgtctcccatggataaatacctctcaacggacaaggataatatgtttgtgggctggaagtggaccaaggtagaccaaatgtcgtacatgcgcgacgctaccctgacctacgaactggaaaccaataccggtttttccatcaaagccatggcacgccaccgcaacgaccagcctgccggaggtgtattgcaatactggaaaaacgatggtaacatcgccggaatatgggatgatacgaataccttcatcaaggacatcaccaccaccgaactcggtgtcaccctgcgttacgcaccgggtgagacgtatgtcaacacgaagcagcgccgtgtgcccgtatcgctggatgccccgatcttctccctctcccacaccctcggtctgaaaggcgtgttaggtggcgagtacaacttcaaccttacggaagccagtatccgcaaacgtttctggttcggttcgtggggtaaactggatattaccgcccgtgccggcgcacagtggaacactgtaccgttccccttgttgaacctgcccatggcaaatctgtcatacatcacccagcacaacgagtcattcagcctgatcaacaacatggagttcctgaacgaccgttacgcctctctcgccctgacctacgacatgaacggaaagctattcaaccgcatcccgcttatcaagaagttgaagtggcgcgaaactttccgcatccgtggtatgtatggcaccctgacggacaaaaacaatccgtacaagagccataacggtgaactgttccttttccccatgcgcgacggtgtccccaccagccacgtaatgggcagcactccctacttggaagccagtgtaggtatctacaacatattcaagctgttgcatatcgaatatgtacgccgcctcacctacaccgatataccgggagtgaagaaagatggcatacgcttcatgatattaatgatattctaaaatagcgacttagtgatgaatgatcagtgattagcatagttacttatcactaatcactaaacgttaaacacttattcacatgactccattagcagaaaggcttcgccctaaaaccttagacgactacatcggtcagaaacacttagtaggaccgggtgcggtgctgcgcaagatgattgacgcaggacgtatttcttcattcatactatggggtcctccgggtgtaggcaaaaccactctggcacagatcatcgctaacaaactggaaactccgttctacaccctgagcgctgtgaccagcggagtgaaagatgtgcgcgaagtgatagaccgtgcgaagagcaaccgttttttctcgcaaggcagtcccatcctgttcattgatgaaatacaccgtttcagcaagtcacagcaagactcactgctcggagccgtggaacaaggcacagtgacgctgataggcgctaccacggagaatccgtcttttgaggtaatccgcccactgctgtcacgctgccaactctatgtgctgaaatctttggaaaaagatgatttactggaactgttgcaacgtgccattaccaccgaccatatactgaaagagcgtaccatcgagctgaaagaaaccaccgccatgcttcgctacagtggtggagacgcccgcaaattgctcaacatcctggatctcgttgtttcttccgaagccagagatcccgtcgtcatcaccgatgagatggtgacagaacgcctgcaacagaatccgcttgcctacgacaaagacggagagatgcattatgatatcatttccgccttcatcaagtccatccgtggcagtgatcccgacggtgccatctattggctggcccgcatggtggaagccggagaagatcccgcattcatcgcccgccgcctcgtcatttccgcttcggaagacgtgggactggcaaacccgaacgccttgctgattgccaatgcgtgtttcgacgctgtaatgaaagtgggttggcccgaaggacgtattcctctggcggaagccaccgtttacctcgccacaagcccgaagagcaactccgcctacatggccatcaacaatgccctggaacttgtacgccagaccggcaatctgcccgtacccctgcacctgcgcaatgcacctaccaaactgatgaaacagttgggttatggagacaattataagtatgcgcacgattatcccgggcacttcgtcaagcaacaatttctgcccgacgagctgaaagaccgccgtctgtgggaagcacaagacaatgctgccgaacagaaacatgcggaacgaatgagagcgttgtggggtgaggataagttcagaaaatcgtaactatataaaaaaagagctgtgagatatttattccagctcttttatcattcttcggattaccggtatcatttgaggtatatcttcctctattgtattaaaaacaacttccgcatcaatttcaaaatagtgatgggctatccaatgccaactctttatcaaacataaaccccctccctattgattctgttctttaaacggacattcatttgttctcgtattctaactaaatcaaccggacatcccagaagttcttccaactcactctgaatacgatctaatgtaagaagagaaggtgcgttaccttcgtaacaaatatcgacatcgctatgttccgtttgttctccacgagctacagagccaaacactcctaaacggctaaagccatatttacgggcatttacctgcttatacaacttcaataattctaatatttcaggagtagatttcatattactataattttatatctatacaaagatatgaaaagatagtcagaaagcaaagtaagagaggcaaattcaacaaaacagaccattatttgcattatcctaaatcttttccctaaatttgcgtactcactttaaatatatacaaaatgagaattgtaatattagacggttacaccacgaatcccggtgatctgtgctgggataagttgaaagagttaggcgagtgcacgatctatgatcgcaccgctcccggcgaagttcttgaacgtgctgccggtgcagaagccatccttaccaataaggtagtgatcaacagcgagacaatggctgccctgcccgatctgaaatacatcggcgtgatggctacaggctacaacgtggtagacatcaacgccgcccgcgaacgcggcatcatcatcaccaatatccctgcatacagcactccctctgtcggacaaatggtatttgcacatatcctgaacatcacccagcaagtacgccattattccgaagaagtcagcaagggaaactggagcaagaatcccgacttctgcttctacgacactccactcatcgagctgctcggaaaaaaaatcggtatcgtaggactgggacagaccggctacaacaccgctcgtatagccatcggcttcggtatgaaggtatgggcctacacttccaaatcgcgcctccaacttcctcccgaaatccgtaaagcggaactcgaccaattgttccacgaatgtgacatcatcagcctgcactgcccgctgaacgacagtacccgtgaactgatcaacgccaaccgcctctccttgatgaaacccacctccatcctcatcaataccggacgcggcccgctcatcaacgaacaagatcttgccaatgccctgaataccggcatcatctacgctgccggactggatgttctttctgaagaaccaccccgtgccgacaatccgttactcaccgcccggaattgcttcatcacccctcacatcgcatgggccaactttgaagcccgccaaaggctgatacatattcttatcagtaacttaaaagcatatattgacggaaaaccggtaaatgtaataaaataagctacgagctacaagctacgggctacgagtggctgcgctatcataccgaaaggcactcgtaactcgtagctttgtaacttgtagcccgtagctttacaacaacatgggaaaatcagaaatcaaaagtttattccgcagcattccagtcctcctgagcatcgtattggcccttgtcacgatgattgctgcattctccgggaacttcgaccccgccaattcaaggtacatgcccgtactgggattagcattgcccgcactattgctatgcaatctgttagtcgccatctgttgggcattcgcccgcaggcgctgggcattcattccccttgcagcattagttttcaactacggatatatccttgccatcttccagttcagcttcaccaagaagattcccgaagggcactacagcagcaattatgccgacggatacctgaaaatagccacctacaacgttggcaatttcggaggagagattacaggctactcctgcaaggaaatcgcccgctacatgaaagaacaggaagtcgacgtcctctgcttccaggaatgtggcgacaacaaatacttcccgatggacagcatccgcaacgtattttcccactggcgctacgccttgatccctaccgaggattctatccgcggagtgcttcctatcgccgtgttcagccgctacccgctcgtcaatccccagttcatttcctaccagcaaagcgccaactgtagcatgcagtgcgacattgtcctgggacgcgacaccgtccgtctgctcaacaaccacttgcagaccaccagcgtcagccagaaccgccggaaatgggaacgcggacttgccaacagtaacgacacccgtcgtgaagcagaagtcgtgcaaggcgccatcacttccctgcacgacaacttcgtgaaacgcgccgaacaaacggacagcatccgccaactggtagttgccagcccctaccccgtactggcatgcggtgacttcaactccctgccatcctcctacacctatgccgaactgtccgatgtcctcaaagacggcttccgcaccagcggtcggggctatatgtacacctaccgctacttcaaacgtctgttgcgcatcgactacatattccattcgcccggcatccagggataccgttactactcgcccgatctggacctgtgcagcgaccataatccggtgctgatggaaatgaaaataaaaaaatgatcggaacagaaatacaaacctcgcccttacccatgtggagtttgtcaacgtcagcggacaaatcatcgcctcatacaatactcacaatatggaaaacatcgataatgttttcatcctgcctgtacaaaatccagcgcacagtttctatctggttacgcacctacaaccactaagatggctgtatcacttataaagcagtactaccataaggctgatgtgacaataagataacaaaataaaggatttaacttcataatatctacttttgccaattatagataacaagagactctaactaaaaatcgcttccagaagaatagaaccttagtttatcagaattatatcatctattggcatgttacagatggtctattcagcacaattgcatcatctattctgactaaacggatcatctattccactcaaacagacgatataatttgaaaaatagctacaccctttgccccgtagctacaccttcatccccaaagggtgataccatcgtcggaaaagggtgtagccattccgaaaagcagctaatatttttatattttgaaggaaacaagtgacggagaaagataatcatttttcaacaaaaacagtcattatgtaatcattaagaatgaaataataaatatatcccttctcaaacatattatctctcattattataaatcatattgtattcactaaacaagaaatccttgcatttttctatatcacaaaaatcttgatacgaaagaacaaaacctaaagcattacgatttacattttgtcattttgatattacttattggataaaaccaataaaagacttccttcaccaaagggaatgaaagaatcatgaggaaactaaatatgaaacattatgaagagatggaattaacgcactgtattacagatatgtaaccgcagtggcatttgttataaaggtggactgagctgtcacggtatagctaaagatacgcgtacggaatggcaataacattagttgcgagtactggtatggagattgaagatggattgtccggaagcacgcatagttgggacttcgggatttaagtttggacgtcaatgaaaatggggaatctaaaaaaagacgcctcacaaaagtgaagtgctccccaaaagttagacataaaactttttggggggcacttcactttaacactacctcatttatttttataaaagtgaaacatttactaaatatatctatttaaaaacatccaccattcagacgtaaaaattactcttaccaaatccaatcattaaaatcataggcagcttctattgcattttccacactatcaactagattacagaagaaatcaattcctgtttccatctccagtttgtcaatactcaccgcatagaccttgaagtcatcagctgtaggtttttgtggcaaggtttctgaatgaggcaccaaaaagccaatagcatgatatacaccgtctttttcggacagaagagccatgtaataatatgccggacaaaccaacccatgaatagtcttaccattagtatctgtttcaggatatttaccatcaccacctttcacagtacctgtaaagtctgtaagcaatttattgagagtggcaccctttgttacatataccttatcataagtaccacctatagtagaccgtccccacttttgcactaactgctccagtcctacccaatatttctgattaaacgaagctatctgcggtgatatattcgtataaagaaaagtctgttcattggcttccttacaatatacacgatcttcactagcgcaaatatgtcctttatcaaaaccatcacttttgtggttagcttcctctactcctcccattgtatcaaagtcgtatgcagaatcccaatcccaggcatcagtacgctttacattatcttgtgaagttagcttatcaaaatgaaaagctacccacgaggaatgacgaagttccgtattccaagaagtcgccagattcataatgtattgatcagcatagttcacataatgctcgcgataaatcccatcagcctcattaattgctggcatctctaaattaagtaccgaaggaaaatctatcaaataagcttcattagcattaatattgggtccaactgatgtctgatcggtcagaacatactctattcccacattgttgccatcaatataagccacacgcaatttcatatagttatatacacgatattcaccataacgcgcccaataacatttgccttcgattacctcagccgtatgactccatgtaccctgctcaggcgcctctgccatgccatcaagtcgtgtatttccatcctccaagaaatagaaacgggaaccataaaaagtcttttctttcaaataaaacggaagagaagagccttcaggattaaacacattgaatccctttttagaatcttcgtacccctgcattacaaaagtagaagcatcactctgtgtagtctctatgtaaccattatccggaataatatctgtgttacaagctattaaagtccaagcaaagagacttacaaaaaaaagtttattaaatagtttcatatattaattatataaaaagggaggtgacaaatacttcatacaaagtctgtcacctccagttaatcaaaatatttactcagcgtctttttctttgatcaaaatattctgaatttcccacgttggcgcactctctccagtagatacatattggaaagcgatacgtacgatattgcctacatatttagaaagatctatatttcctacattcacaaaattccagtctgtacctactggacgtttctcaagctgtatttcttcccacgtagcctttgtcacatcatccttataatcaatagaaatcttcacaaaacaatgttgagctacagtagcattggtacccagtttattgacggcctcatcaaaggtcatcacaggagccacccccttacggaaatcaaatgcaggagataccagccagctctcggccgcattacactgattattgaaagcagcacccttccaaccataggaagtagtatttacccatacaaaacttataccaccgctcagcgacaagtcttgagccttgaatcctgcttcattaccattcagcgattcatcgatatagacgcttatcttggcagatataccatctttgtcaagcgtgaatgttgtaacttgctccacgctttcaggagttgcaatccaactacctgcacttttcgtgaattcttctacaccgtaagcatcggcactctttttgtaaaccaccactgcacgatctgcatcaacggcatatggatacttagtattaaggtaaacaggcaataccaattctggttctgtaatagaggaagcacctatggaagcataaactgaaggttccactacagccaccctagcatcatcattggcataaagtgaccagctctcgccattaaaacgataaagtgaggacgtgttagatgctacataagcgcgggtcatagcacgagtgtttgctgatacagcataatccgtagaaacccaaactgtaagagcctcaggactaccaaaattaatagcctcatctatcgtaatataaggcaatactgcattttcttctatctcgatggcaggggatactaaataggattcagatgcatgatttatattactaacaaaagcagaagctttgaaaccaaacttgtctgtattctgccatataaaatctaaaccatcagtattgacatcatagaaagtgaaaccacccatatctcccaacaaggaattggtataatatgtcttatcactaactttagaaacagcataactaccaaatgagtattgagcaacgccttccttatttacatagtaattcaacttcacgcttttttccttctgcacattggtgatagtgaacaagtccgaaccacccgcagaagtaatcgtccaatcatacccctctgtaccaacttcagtagtcacgttaaagctgtcatatgtaccactcatatatagatactgtcctaacgcattcttaatattgaaacccacttcggtagcttcaagcgcaataataaaattagcagcatcagtagctgcaataacgccaccttccacctttataggatcaggatacatatatccatatgtttttccatcatccaaacgtccaaaaggataatactgtccgtcggcacccaacgagactatcacatatttacccgctcctccaaaagcactgcttttagataccttagcaaatgtgccatcggtagcttcagcaaataaataaacatccaaataaggtacagaaagtactttagcattcttcaactcccacgtagctgcccctgtagtggtactggtatatttgaaggcaatgttcaccacttgtcctttccatgccgaaagatcaatagcacccatatttacaaaatcccagctctttcctaatgcacgtacaggtactgttgcaacttgagtccaagtcggttccgaaggaactccaccaccaccaatactaggttccgtttcagaataagcatagtctacaactaccatatcgccagcaactgcacttgcaactttttctttcaaaatagcgggaattttacttatagtagcaggtgaaagataagaagcttttaccttgtctccccacaccccatcatagtcttccaactctaatgcataactggatatattagtaaagtctttcagataagcagacggagcctgatactgattatatgtaacagtgaactttgacttaagatctgcattaggatacttctcagccaaaaaggcagggatatattcatcagcagtagcatcggcagtaaaatacccattttttcctacattttctaatgcctctaaacctgtcttcccttctggatctttagccagtgccaaagcttgattggttttatcaccggcaatagaagcatagtctgaggtttgcagcgtcatagtgatatttttcacatcctgatatccactattaatatcaaactgatcattgtaatcgtcgttacaggccgctaacaacaccagcaaaacaaatgatgtaactatattttttttcatatttctctgtcttaaataatcttcatgattagaaattaactctcaaacggaggctatatgtacgcccgagggtgtagaacacatatacattctcgtctgtagcgaccttacctttaggattccatgccttttcaatatactgatagttcagtaaattattcacattacctgagaatacagcatccagagcaccaattttaaatttccaggaagcattcaagtctatcatacttgcagcaggaatcttccatggatcatccaatgtattttctttatttatactaagtaatgtaccatctacttgataatatgaatagttgcgaccataataggtccaatctgcaccaacacgaatatctttattcacatttacattcaaaccaacagctgctgtagtctgagccgaaccacctacacgtacaccatccatattgataatggcccatgcatgatcaggtcctaacagttcggtaacattaccattcttgtcaagaggctgtccaccttgctcagaaaagaaatatcccttagcattgctaccccacttccaatcaccgtaagagaacatccctgtcagttccatccaattaaaaggcttaaacttcaaatcgagttccgctcccatatgagtagcttctacacctgacatattgatattagcacgtgtataacccaaatctgtaccagtagtcattgttttgtccatccacttagtatagtaaagattgacattggcagtcaacatacggttacggaagccatatcccaattcagcagagaaaattttctcatttacagcattaggattagtagcattactactagtagcttgcataaatgcaccataagagaattttggcgcacgactaatagcacccacattgaagaatacattgtgattttctgtcagattataattagcacctcccttggcagtaaagcccaagaaatttactgtttccgatttctcgtgctccttgtcataataaaaacggtctacacgccaatagccagtgttagaaagagaacctgaaacaaaagcagccaatttatctttgttgtattccaattggaaaaaagcaccctcctgcattacataaccgtcgtaatcacgataaaccacatcgcccacataaagtttttgataggcccacattggatcggctgccgccgcattattggcagcttttactttcaaacgatctgcattatccatgtagtattcacccccaaaaagatcagaaatcacattagtatgcgtacctttataataacgaaaatctacaccaccataaaaatcgaaattctcaccaaatttagtcgtataagtagaaagcaaaccataccaaacatgttcgttcttagattcagacattactaatgccgatccatattcactagaagcattataatcttcaattgcagcatagtcaaaggtaccgtccggacgacggaaagtagtattcaacgcacctttataagcaccattccaagaagaatagctataaggagagaatttatcgttaccttgaccagaataaccaccaccacgtcccagtgacatatataaagaagtagaaagagaagacttacgatcaatctcccattggtgatttaaactaatctgtggtttatgatagaaattatggtttgcattataagcttctccatttttacgataaccaaacgaagggttgtacttattatccgcaacaccataggtacgctttgtcatttcccaatcagcaatggtcaaacctgcacctttatcacgttgatcatgatgctgcggtgcaccagtagccataaattgtaactggtgattatcattgattcgtttggccagattgataaagtaattgtagccttcaaacttagtaccttgtacataaccgtctccccagtgtttagcaccaagtaaagtcaatgcccaaccatttttcgtcaatcctgtagaaacattaaactgtattttattcatgccatcattacccatagcataagaaatacttccaccttttttcgattcaagacctctagtcacaatattaattgtaccacctactgaaggtgcagagaccttactagctcccaaaccacgttgtgtttgcaacgtacgagttacgtcagaaagtcctgcccagttgctccaatatacacctccccactccatatcattgacaggtactccattcaccattacggccacattttcctgaccgaaaccgcgcatgtaaatttcagaatcgccataaccaccaccctgtttattggcatgtacacctggtgttgattttaaaatttcaggaaattcctgcgtacctaacttttcttcaataaacgtaggatctactgtagacaaagccactggagtcttacgagctactgccacagacgaagttatcaccacgtccttcaacatcaccgcatccggctccatttgaatagcacccaaatcaacagaagcacccttctgtgttattttcttcttgaggtctttaaaacctacatacttgaacaccaatgttccaccttgagcaacaccttgcttaaaataaccatcaatgtcagtcacagttccttgtgaagtgccttctaccataacagcagcgcccactaacggttctcctgtttctgagtcaacaagctgacctttcactgtagtctgggcaaatgccgcagcactgcatatagacagcacagccaccaacaggaaatgaattagatgttttttcatacttctgttttttgttaattaaatgtgttaattacgaatgttaattaagtattaaatactgttttaagacgcaaatataattaataagatttagatttgtattacatttctgctacaaaatttcagggtatataggagttattgaaactttttataacaaaaaagccctacaagttttttgcagggctttctatttgtcataaaaatattagttatgctatcagattcttactgttatcagtcattcatcagctttctataacgtacacgggtaggttcttctttccctaaacgtttctgtttattttcctcatattccgaataagaaccttcgaaatagaagacattggaatcaccttcgaatgcaagtatatgagtgcaaatacggtcgaggaaccaacggtcgtgactgataattacggcacatcctgcaaagtcttcaagaccttcttcgagtgcgcgaagcgtattcacgtcgatgtcattggtaggttcgtccagcaacagcacgttgccctcttctttcagagccatagcaaggtgcagacggttacgttcaccacccgaaagtacaccgcaaagcttctcctgatctccaccggagaagttgaaacgtgacagataggcacgtgcattgatatcacgtccacccatacgaatcagttccgtaccaccggaaataacctggtacacgctcttgttcgggtcgatatcgctgtgttgctggtcgacataagctacctttacggtctctcctacttcaaactcacctttatctactgtttccagccccatgatcaaccggaacagcgttgttttacccgcaccgttaggcccgattacacccacaatgccgttaggcggaagcatgaagttgagatcatcgaacagaagtttgtcgccataagcttttgccacgtgcttcgcttcgataaccttatttccaagacgcggaccattagggataaagatttcaagtttctcttctttctccttgatatcttcattcatcaatttatcgtaagaattcaaacgtgccttacctttcgcctgacgcgctttaggagccatacgcacccattccaactcacgctccaatgtcttgcggcgcttgctggcggttttctcttccatttccatgcgcttggtcttctgttccaaccagctggaatagttacctttccaggggataccttcgccacggtcgagttcaagaatccagcctgccacatggtcgaggaagtaacggtcgtgagttacggcaatcaccgtaccctcgtattgctgcaaatgttgttccaaccaatcgatggattcagcgtcaaggtggttggtaggttcgtccagcaacagcacatcgggcttctgcaacagcaagcggcaaagtgccacacggcgacgctcacctcccgaaagatggtctacagttgcgtcttcgggcggacaacggagggcatccatagcgcgttccagtttactgtcgagattccaggcatcagttgcatcgatgatatcctgaagttctccctgacggacaaaaagcttatccatcttgtcggcatcctcgtaatactccggcagaccgaatttctggttaatctcttcgtactcagcgagtgcgtccacaatgggttgtacgccttccatcacaatttcttttacggttttcgtaggatccaggtaaggttcctgagccagatagcccactgagtaacccggtgaaaacaccacttcgccctgataagacttgtccaacccggcgataatcttcagcaaggtagatttaccggagccattcagaccgatgatgccaatctttgcaccataaaagaacgaaaggtagatgttcttcagcacctgcttattgttctgctgaatggtcttgttcagccctaccatagaaaagataatctttttatcgtcaactgttgccataaagtttttaagtgtattatattaataatgtatatgctattccctttccgtgaatattgggcaaagataacaaaaaaagagatatttctttgcatttaaaaaaaatgtctatatctttgtgcccgcttaacagcaacaaaggttcgattcgctagctcagcaggtagagcacaacacttttaatgttggggtcttgggttcgagccccaagcggatcacttgaaaatcaagcagctatctaatcagatagctgcttttttcattcaaatactacgtttttcgctttctgatgtaaaccggaaattcgtatgagcgaaacagttaaagtcttatgttacaagtctaaaatccttagtaatggcgaatatccgctaatggtatgcgtttgcaaagatggcaagcacaagtatcaaagtctgggcatattcataaaagaggagctatgagacttcaaaacaacacaccaaaaactaaatgccctaatcgggaaagaataatcagcctaatcaatgagagaataagcgagatacagaaaaccgctttagataaaaggatagcaggcaaatactttacggctgcaacccttgttgaagccacaagtacaaacagcgttgccaataaaacggttgatgaatactttcaggcttacattcagaatctgaacaaagagaatagaatcagatatgcaggaatgtttgaagtgccctattcctcttttataaagttcaataagcatcttgccattccatacacaccgcacgccactcctttgcaactactgtaacgcttggacaaagagtttccaaagaggaaaaaaagtgctgaagcacacaaaatcaacgacatttggggtattgacaaaatttccgtgttggtagtctaacctaacggttcttgtgggaagaaatctttaatactacaattcaatgctttagctatctcattcaacagagtaatgttatacttttgtggccttttaatgttctcaacatgtccgataaatcctctattaacatttatataatcagccaaaacagcttgagaaacacctaactcaatccgtctttccctaaccttatcaatcacatactggtcaattttgctaatcatacctacaaattaattaattggtaaaggaaagattatttgagaaaacgtttgcaggtcaataagactgtattatctttgcataatcaaaatagaggcaacaaaataggtgtggagagataaaaccacttataaaactggcaaacttatattgttaccaatatgatgataggtctactttatagattcaggcttaaataaagaggtcggccaaagtagataacaagggggatattagtgttcccctttcttttgattgtcttttctagaaccattttacaatgtgaatttgttattttttcccgaccttcaatcctccagtcatagctttcctcggcaaccgcatcaatttccttgctggcgcagtctatctgtaaattagtaagcttgcctttgtcacgcgcgaaagctacaagccagtttacaaaattacatttacaaaacacaaatattccgtatatgtatttgcagctgattatcaaagaactacaagatatctattttctgtcaacaagaagttaggagtttgtcgacaaggagttaacttcctgtcagcaaactcttaacttcttgttggcagaaagttggatatatttctattatttgacaaatgtaatattactatattaggaatcaactgttttttgatttatatttgcaccgatatgaatgagtacgaacagaaacttgaataaataaaaaaacatgattaaagcagacttgcatattcactcccattatagtagcgatggagagtttaaaattattgatatcataaacaagtgtttagctcaaaatatagacaccttctcactgaccgaccataactccgtaaaaggtgtccaggaggctgccgacggagcacaacaggctggcatccgcttcattccgggcattgaaatagattgtaactacgaaggtgtcaacttgcatttattaggctatcatattgactggaaatcctatgattttcttttattggaagaagatatcgcctctaaagtaatgaactcattcagcgaaatgatcgacaaccttcatcgattaggcttcaccatagaagcagatgcagttctggaccaagcgaatgtaaaactgccatcgggcgaattgattgctgaagtaatgctaaacagtgatatatatgcttctcccctactgtctccttatatgaaaggaggtaaaagaagcgacatgccttatatcaacttttatcttgactatttcgcacaaggtaaaccagcctttgtccccattcagtatatgagcttccggcatgccgtagaaatgattaaagataatggtggcataccgatcgtagcacatccgggacttaatctgaagggaagggagcagattgctgagaagctattggacaatggggctaaaggtctggaagtatttaataattaccaccaatcgaatcaaatcagctacttcgcatctttagtgcaacggcagaaggcaataatgacctgcggaagcgattttcacggaaaaacgaaacctctaataaacatcgggcaattcaacttcgaaggtcagtttgaagattatctgaaagaatccatttatttgcatctttataacaacaatagttcgttaagttttgaattaacataaaaaagtaggtcaagtcctgcagattcattaaattaaggataaccacatcttcaattataagattgacgtgtttaacgaactattgaaaaataacaggtgcctctaatttaacccatattcaaccaaggcgaaccatagtccatccacttaaaacgatgcatactacctaaatcaactctcatgatatattcgtcttcaccaataaaatcatttaaaatcttttctgaaaatccccacccaccggaggcactcgctttttccaagacattgacaaggggataaaatgtatgcatatactcaccaggctgaagatattccgcttcacattgaagcatttctttcgtatcgcatataatcaaaaaacctttgcctttactaaagcttcttgcgcattccaatcgaccggtaaaactcgcaattttaccatccttaccaagcctattgcacgttcgaaataaaatcggtcgtgttgtcggcaaatagttccgtaatacaatatcccacacatcaaaaaaagccttacttttttcatcgggtccagtaagaatccaattaccaataaatcctacagtctgatcagttatctctgagttcttttctaagatatcaatcaaattttgagcgatctctactttctgtttttctgataatctgtattgaaatttatcattcataaacttaataacaccttgttgtaccttatgtgcacaaaaataaggaataaaaaagacattctttcttattttgtgaagtttttcaaacgtcagacaggctccctaccagcagaattcaggaaatagtttcaaaaagttaaataaagacaatcgctcaccttttccaaaagatttcgtacatttgcggcgtctgacattagtgtcagacttatgtatctgattttattatttatataccaaatcagcagaattctattatggatatttacaaagtcggcctggatatcggctctactaccgctaaaataatagtgctggataagagtgagagaaatgtccttttctacaaatatgaaaggcatcaggcaaaagtccaggaatgcctactggcatttttccaccagctgaaagaacagatgggcgatgttactttatcaatcaatatcaccggttcagtaggcatgggaatcgcagagaaatactctctgcctttcgtgcaggaagtggtagcggcagcccaatatattcggcggaatcatcccggaatatcttccatgatcgacatcggaggagaagatgccaaagtcgtcttcttccagaataatcaagccaccgatttacggatgaacggaaactgtgccggaggaacaggggcatttatcgatcagatggccatattattgggagtatcgatggatgaactgaacggactggctctccgggcaacacgagtacatccgatagcttcccgatgtggtgtattctgtaagacggatattcagaatctgatagccaagaatataccgaaagaagatatcgcggcttccattttccatgctgtaacggtgcaaaccatcgttacacttgcgcatggatgtgatattgttgctccgatattactttgtggaggaccgttgacatttattccggcactcaggaaatcattcgccaactatttgcagttatcagaggagaacgactttctgctgccggagaaaagtaatcttattccagcctggggagcagcactggcagagaactcccggaaaatgaagataactgagctaaccggacttctggaaaatctatcagaaaaagcataccagccacaaaacagccttccaccttttttcaaggatgaaacggaatatctgcaatggaaggacaggttggcacaatatgatgtgcagcggacggaattaacatccggaatacaacaggctaccataggaatagattccggctctaccaccaccaaaatagtagtgcttgatgaaaataaccgtatcctgtactcctactatcacgacaacaaaggaaatccgataaaagccgtggaagagggattgcagaaactgcataaagaatgtcaggaaaaagggacaatcctgcaaatcaaaggaggatgctccaccggatacggagaggatctgataaaagctgccttccagatggatgccggtatcattgaaaccatagcccattacatggctgccaaacatataaataaggatgtatctttcatcctggacatcggcggacaggatatgaaagccattttcacaaatggcggaattatcaaccggattgaaataaacgaggcttgctcatccggatgcggttcttttatcagcacctttgcacagtcactggactacaaagtggaggacttcgccaaagcggcttgtttctcaaaagctccgtgtgatctgggaacacgctgcaccgttttcatgaattccaaagtgaaacaagtgctccgtgaaggggcatccgtggcggatatagcggccggtctttcttactctgttgtaaagaactgcctgtacaaagtgcttcaacttaaaaagccggatgaacttggaaaacatatcgtggtgcaaggtggaaccatgcgcaatgatgccatcgtacgaggtctggagaagctgacaggaaaagaagtattccgtagcgattgtcccgaattaatgggtgctctgggctgtgcactttatgcaaagcaacttaagacggccaaagttacaaatttggaaaatatgatgcatcaggcccaattcacttcccgacaggttcagtgcaacggatgtgaaaaccaatgtgccatcacccggtatgctttcggtaatggagaacattatttctccggcaataaatgcgaaaaggtgtttaccaataaagggaatgtttcggagaaaggcgtaaatgcttatgaaaagaaaatcgaacttctgtttgatcggcaagtaaatatagccgctccactactgaccataggtattccccgctgcctgaatatgtatgaagaatatcccttctggcattctttgttcacagagtgcggcatccgggtatgcctgtcggatgcttcgacgttcaataaatatgagaaggcggccaatatggtaatgtccgacaatatctgtttccctgcaaaactggtgcacagccatatccaaaaccttatcgaatacaaagtagaccggatatttatgccgtttgtcatattcgaagaaatcgataagcaacaacagaacagttacaactgccccattgtgtccggatattcacaggttatcaagaatgtccagacagataacttaccgattgaccatccggccatcactttcaaggatacaggattactgtataagcaatgccgtgactacctgagcacactgggcgtacaagagcaggtagtaaagaaagcattcgaccatgcactgaaagcacaagacgcttttgaaaaagagcttatcgcctataaccggcaaatagttgaagaaggaaataaaaagcagaagctgattattctccttgccggacgtccatatcattcggacccgttggtacaacataagatttcgaatatgatcagtgctatgggcgtttatataattacagatgatatcgtccgtcatcaggatattccactgaaagaggtgaattttctggctcaatgggcatttaccaaccgtattttgaaatcagccaaatgggcagcgcagcagggaaatcacgtgcaatatatgcagctgacttctttcggatgtggaccggatgcctttctgatagacgaaatacgcactttactgaagcagtacaataaaaatcttactttattgaagatagacgacgttagtaacaccggttccatcaagctgcgtgtacgttcgctggtagagagtctgcacatcagtttgcaacaagctgaagagagacaggtacagaaacctttatccctccctcttttcaccaaaaaggacagaaagaagaagattatcgccccattcttcaccccttttatatcaccacttattccttccatttttaaagtggcaggatatgaaatggagactctgcccataagcgatgaatgttcgtgcgactggggtttgaagtattccaacaatgaagtttgctatccggctacactgattgtgggtgacatcgtgaaagcttttaaggaaggacgatataacccggacaacacttgtgtagccattacgcagacgggagggcaatgccgtgccagcaactacatctctttaataaaaaaagcattgatagaaaacggatacactcatactcccattctgtcaatagcattcggcagcggaatagataatcagcaaccgggcttcaaagtaaattggctgaaagtattgccaatagcgcttgccgctgttctatacagcgactgcatagctaaattctattacgccgccgttgttcgtgagaaaaagccgggacaggcagctaaattaaaagatatgtacctagaagcggcaaagcctcttatcctgaaaaacagaccggaagatttgctcagttatttatctctggcagttgacgaattcaatcagatctgtcagcaaaaatcataccccaaagtgggtgtggtaggagaaatcttcctaaagttcaatccttttgcacaaaaagatatcaccacatggctcatagacagaggtatagaggtggttcctccattgatgacagactttttcatgcaaagcttcgtcaatatgaaagtaaaccaggatagtcatataaaaaagaaatatattcctgatttcgctatcgactggctttatggaaaagttcagaaacaaattgataaaatcaacaagataggaaaagccttcctgtactttcaaccctttgaaaatatttacgagaaagcagaaaaagccaagcaggttatatcgctgaacacgcagttcggtgaaggctggctgattgccggagagatgtcgtcttttgccagtcagggtattaatcatgtcatcagtttgcaaccattcgggtgtatagctaaccatattgtggaaaagggaatagaaaaacgtataaagtctgtctaccctcagataaatatattatctttagattttgacagtagcgtcagcgatgtgaatatcaccaatcgcctgttactttttgttgataacataaaataaataagaccatgggagctacagaaaacaatgagttggaatatcaaataattgaaacagcgaaacagctttttatagaaaaaggcttcgttgaaaccagcatgagtgatattgccgcaaaagtaggaataaaccgtcctaccctacactactatttcaggacaaaagacagaatgtttcaggctgtattcggttcgatagtgatgtcactattaccgaaagtacaggaaataatacagcaggaactgccgttcatagatcgcgtaagtcttatattggataagtatataacactcttcaccgaaaaccctgacatgccaaagtttatatgcggggaaatacagcgcgatgtcaaccacctgcttgatgcagctaaggaaatgcagtttgaagaaacgttcctgattataaaggaacgactgctcatggaaatggaagcaggcagactaaagaaagtacccatacatacagtattcataactttctatggtttgcttacttttcctttgattacaaaaaatttgatcaccagcatattcctgaaagatactaccgatttttcggtttttatgctggagtggaagcaatatattctttttcacttgatgaatttactgggtattgagaaggaaaattgattgttactcatatacataaccgataaaaaagtatagtatgaaaacgattcgaattattttctccttattgctgataactgcaatgagtatgcctactctttcggcacaaactaagaaagagaaaaaagaactgaagaagcaggccgttgaaaaactggtcacatccgggaagtataaaataaatgtaaacagagctcttcctgcacgaggacggtctgttacactaacttcaccgtactctgtggaaataagaaatgattccgttatatcttatctgccttactatgggcgtgcttactctattccttatggcggtggagaagggctaaactttaaagctccactcaccgactataagttggagtggggcaagaaggaaacagccaagataaagttctctgcacgaagtgaggaggataagttcgatttcagtatagacgttttcagtaacggatcatctacgatattcgtgaatatgcagaaccgtcagtccatcagtttccagggagaactggatatgccggaaaaaatcaaccaatgattacctttgtacatgatatctttttaaatttatgtataaagaataccaaccctgcgcactactctctccctatatagacaagtattgggaattcaaagggaatccggagtacggaatgcgtatcaacatacttcctgatggatgtacagactttatcttcacccttggggaagcaacacaagcggtgaatagcagtctgaccatgaagccttatcgtgcttattttataggtccgatgaatagctattcggaattggtagcgtatgcggaaacggttcacatgttaggggttcgcttcctaccttgcggactatcccgttttatccgtctgccactgcacgaactgactaaccagagaatcagtgcagacgaggtaacctgctttttcgatacttcttttgcagaaaggctatgcgaagaagactgtttagaaaatagggtaaagatcatagaagaattatttatcaaatctctttataaacacgacttgccgacagatccgcagattgtatttgcaataaaacagattaaccggcatcagggaaaactgcccgtgcagtcattgatggaggatatttgtctgtgccagcgacaatttgaacgcaaattcaagatgaacacaggttataccccgaaaatatacagcagaatcatgaaattcaagaacgcggtggatttattaaggggcactaccagtgacaatctgctctctactgctatccatgcaggctattatgacgtgccgcacctctcaagagaaattaaaaggttatccggcaatactccctactctttcctttctattcctctgacagaagaagatgtcacactgacttacgtagaagcataaatgtcgtttttgtacaatgcaggaatatctccgactacctatatttgcaccattcaattaacaaaacaaattctgcattatggaaacaatgagagaaaaagccgcacaaatgttgcgcgaaagtgaagtagtcgttctgacctcagtaaataaagaaggatatccacgccccgtacctatgagtatggttaagtccgaagacatttcaacagtatggatgtcaaccggaagcgactccgtgaagaccgaggattttcgcaagaatccgaaaggcggactatgcttctatgcacagggaaacagtgtttgcatgacaggtgatgtggaagtaatcacagaccaaaatgtaaaacaagagctttggcaagactggttcatcaatcattttcccggcggaccgaccgatcccaactatgtaatactgaaatttacagcaaaccacgccacttactggattgacggaaagtttatccacaagaaagtttaatggaactctgtcgaaggaattcaactcaatagacagaaaagcgaccggcagcgtggttattaacaaataatccgtaaatttgcagcccgaaatttagagactgtaaagaatgcaaggaacaaagaatctgactaaaggtcccattaaccgccaactattcaatctggcgatgcccattatggctacctcgttcatccagatggcatacagcctgacggacatggcatgggtaggccgtataggtagtgaagctgttgccgccgttggtgcagtgggaatattgacgtggatgtccggctccatagccttgctaaataaagtaggttcggaagtcagcgtaggacaatccataggtgcgcgcaacgaacaggatgcccggcagtttgcttcgcacaacatcagtattgccttgctcatctccatctgctgggctgctttgctattcttgtttgccaatcccatccttcgtatattcgagctgaaagagcatatcacggaaaatgccgtgacttacttgcgtattgtctcaacaggactaccgttcgtgtttctgtccgcagccttcaccggaatatacaatgcggcaggacgaagcaaaacacccttctatatcagcggcacaggattgattatgaatatcatactcgatccgcttttcatcttcggtttcggctggggaacggtaggtgcagcacttgccacatggctggccgaggctacggtattcggtatattcatctataagctacgctataaggacgatctgttaggtggatttcccttcctgacacgtctcaaaaagaaatatacccggcgtatattcaagttgggacttccggttgccacactgaatactttgttcgcttttgtcaatatgttcctttcacgtacagcttcggaacaaggtggacacattggtcttatggcctttaccaccggaggacaaatagaagccatcacctggaatacttcacaaggtttctctaccggactaagcactttcattgcacaaaactatgctgccggagagaagtcgagggtaaagaaagcctggtacactacattatggatgacgtccatattcggtacactatgttcgctactgtttatctttttcggaagcgaggtattctctattttcgtacccgaaccggaagcatttcgcgtaggtggtgatttcctgcgcatagacggttattcacaactcttcatgatgctggaaatcaccatgcaaggggtcttctacggattaggaagaacgattcctcctgccatcatcagtatatcatgcaactatatgcgtattcccgtagcactgttcctggtacacatgggaatgggcgtagacgccatatggtgggctgtaagtgcaacaactattgccaaaggaattatccttaccgcgtggtttatattgataaagagaaaaatactctaaaaatgcagaacaaaagacctaaacataattacaatagaattgttatataactaactttgcattacaaacatagtaacattttaaaagaataaagtatgaaaaagattaagattagtgtactgctattgagcggtgccatattattaggaagttgcagcacaatgaataacactgccaaaggtggtgtgataggtggtggatcgggcgctgctgccggtgccattatcggtggattgattggtaaaggtaagggtgcggctattggtgcagcagtaggtgcagcagtaggtacgggtgcaggtgttgccatcggccataagatggataagaaggctgccgaagctgctaagattgaaggcgcacaggtagagaaagtaacagataccaatggccttgccgctgtaaaggttacttttgaatcaggtatcctgtttggcttcaattcatctacattgagcaatacttccaagtcttctctgcgtgaactggcccagatattgaaagaagaccctacaacagatattgcaatcgtaggccatacggataaagtaggtacatatgaagctaacatgaaggtttcaaaagaccgtgcatataccgtagagaattatctgcaagattgcggtgtgtctccttcacagttcaagaaggtggaaggcgtaggctacaatcagtatgacgacagcatgtcagccagccagaatcgccgcgtagatatttatatgtacgccagcgagcagatgattaagaatgcagaagcaggcaagtaagttacgagctacaaaaggctacgagctacaagttattgcgctatcagtccgaaaggcacttgtagcttgtagcttgtaactcgtagctttttaacattaaaaaccacgacaatgagtataaagaaagtcttgcggatagtccgcaacctgatactctttttctttatttccactattctggcagtggtgctgtatcgctttatccctgtttacaccactcccctcatggtaatccgcagtacccagcaactcttcaaaggcgaaaagccggtatggcatcatacttgggtttctttcgataagatctcccctcacttgccgatggcagttatcgcttcggaagataatcgctttgccacccacaacggcttcgatttcgaagagataaaaaaagccatgaaagagaatgaaacccgcaaacggaaacggggtgccagtactattagccaacagaccgcaaagaatgtattcctttggccgcaatcctcatgggtacgaaagggattcgaagtttatttcacctggttgatagagctatgctggtcgaaagaacggattatggaagtctatctcaactccatcgaaatgggacaaggtatatatggagcagaagctgccgccaaatataagttccatactactgccgccaaactgactgcgggacaatgtgcattgatagcggcaacactccctaatccgatacgttttgattcagcgcatccgtcagcttacattctgcggagacagtcgcaaatccttagattgatgaagttggttcccaaattccctccggtagaaaagaaagaagtcaagaagcagaagactgagaagaggaaaaagaaataatctgtgtatatttgtatgcttaatatggtaaggaatgaaaaaaatcttgtcgctattcttgatttgtatcatttgttgcggggtgcatgcccagcgtacggaggtttataatcagcatatacatacggtgcaggtcattgccaacaatgattatatgtcgcctgccgtcatccggctgggagagaatgaaactgtagaaatatctttcgaccacctgactcacgattaccaccgctaccagtacatcctcacgcactgcaatgcggactggacaccttcggatctttccgaaacagaatacctggatggtttcaatgacaatccgatagaagatcatgatatttccgtcaatactaccctgccctacacgcattaccgtctgacacttcctaacgaccaggtacaactgaaactttcgggtaactaccgtctgactgtttatgacgatgcggatggaaaggataagccggctttcactacctgtttccgggtattgcaaaaggaggtgaacgtatcggcacaagtcagcagtgacactgagatagaccggaataagacgcaccagcaggtgagttttagcattcagtataaaggatatcctatccgcaatccgcagaatgaagtcaaagtacacgttttacaggataatcgtacggataactgggtaacgaatctgcatccttcctatattggtcccgatcagctacgttacgaacataaccgggccttgatatttcctgcgggaaacgaataccggcgttttgaaatggtgagtacccgctatgcctcgcaaggtgtggagagtattcgttatcatgctccttactatcatgtcacactccgtccggacgagcctcgcttactaaactacagttacgatcaggatcagaacggacgcttcgtaatacgatatgacgaggcagtagataatgctacggaagcagattacttcttcgttcatttttctctgctatgggagaacccgctaactgaagggaacttctatctgcaaggagcttttacttatgataattttaatgaagagagtcggttgaagtataatgcagaaacgcatgcttatgaatgcacgcaattgctgaaacagggagcgtataattatcaatacttatatgtggctcccggtaccaccgcaggaagtaccgcacaggcagaggggaatttctatgagacagagaatgaatatctgatccttgtttaccaccgggccttcggagaaagatacgacaggctgatcgggatgcaacaggtgaaatagttacgagctacaagctacgagtgtttttcagcgtaacagtgcagctactcgtagcttgtagctcgtaactcgtaactatctaatatgcgtgtcctccatctttcatttccttttcactaatcttatgtatatcaatacttctccaagcatagaagatatacgcaagaacaaacggaaccaagaaggaaacatagaacattaccctcagcgtaaactggctggagcaactgtttgccaacgtcagtgaactctgtaaatcattggtagaaggataataagccgtattattatatcctgcaaccagcaacaatgcaagtaccgccagcaccgtacctatgcccgtaaaccagatacctttatcaaactttgtcttcaacaaactctttcctataccgaacagcaccagcaccactcctatcagaaacagcaccaataccagcggcatttcgataaagttcgtcagatacttatacggttccataaagacttcacccgtctccggattcaccgcatatccatctgccaacagcgtgcggataacaaacgacaggaagaacaccaggaacagcacggaattacctatcaacgaacgccggctacgtgccaccagatccttatcatcaatattattaataaagtaaagagctcccagaatacgagccaggaagaacactgccaacccaagcactacattccatggattagtcaacgcatccagaccatgccaaccatttgcccaatgactgataaccggcatcaccgtattcgtcatattccccttatcgatataaaactccgaaccggtaaaaaacgtagccaccgcaccgcccagcagcaccggccctactactccattaatcaccaggaatgtacggtatgtattctttcccagcagatttcccgccttgctctggaactcatagctgacagcctgcaacacaaagctgaacagaataatcatccaaagccagtacgcaccaccaaaacttgtactataaaacaatgggaaagatgcaaagaacgcaccaccaaacgttaccagcgtagtgaacgtaaactcccacttccgcccggtagagttaatcatcattttcctgtgctcttccgtcttgcccaggcagaaaataagcgaattaccaccctgcacaaacagcaggaatacaagaagggctcccagcaatgataccacgaaccaccaatattgttgtagaaaaacgtaggtcataagatttacgatttataatttatgatttataatttatgggggatgatttatgatttatagagaatagaatatgatttataccacgccataattccgcatggcataaatcttaaatcataaatcttataaatcttctccttccggtcctttctttatcgctttcagcaagataccgatttcggctatcagcatgacggtaaacaataccaggaagatgaagaatgttgtctgcacggagccgacatccaactttgagatagctgcatttacaggcagcatatcctgtatggcccatggttgacgcccacattcggcaaccacccatccggcttgtccggccagatagcccaatggaatagtcagcaaagctacccagtgcatccatttcatttttaacaaatcccgcttgtatgccaggaacaatacaactataaagaatagtataaagtatccgcccaacatcaccatcacacgaaatgcatagaatgtcagtggcacattaggaaccaggtcatttacatccttaatatatccataaccaaaataagctacattttccttcaacaccttggcagcttccacagcttcggcatcgttatccgcagcctgtgcggcacgataagctgccagcgcaccaatcgctgttttcccgcgttctattttctcctcggcagaaagtgcctgcgttccatctttcaactgataaccaccctcaataaggtccgtgataccgggcacgaatccatccaacttcctttccgccagcaatgaaagcatctttggtatctctattctgaacaggaaaggatcctgtccgtcattataagtctttttttcaggattcaacataccgatggcaaccaatccggccccctgctgcccctcataatatccttccatggcagccagcttcatcggctgcgtctgtgccacctgatagcccgaaccgtctcccgtccatgcagagagcagggccgaaaccaaacctacccaggcagctatctttatgctggacaatgcgaacttcttattccgcttcttcagcagaaaccagcacgccacacctaccacaaacacggcacccagcacccagccggacaacaccgtatggaaaaacttattcaccgccgtaggcgacaaagccactgcccaaaagtccaccatctcatttctcacagtatccggattgaactccatccccaccggattttgcatccatgcatttgccacaagtatccaccaggccgaaatcgtagcaccaagtcccgtcagccaggtagatgccaggtgaaacttcttgctcaccttatcccagccaaagaacatgactgcgatgaaagtagcctccataaagaaggccagaataccttcgatagcaagcggcgccccgaagatatcgcccacaaaccagctgtaattgctccagttggttccgaactcaaactccagaatcagtcccgtcgccacgcctatggcaaagttgataccgaatagtttcatccaaaacttggcggtgcgtttccaaaactcatcacccgtacgataatacatagtctccatgatacccatgatgactgccagccccagcgtgagcggcacaaaaatccaatgataaatagcggtcagtgcaaattgtgccctcgaccagtcaatcagagaagtgtcgatgtgttcaagcataagaaatcgagttatagttattaattgttagttgctttactcagaagttaaaggagttattgctttactcaaggcggatcaccaatagcacgatggatgagttccctgcccacatactcttctttatctccgcctacggccggcgtattcagataattgggaaagaagaaaaggcgcaatatgaagaacatgatgaagagtttcaccagaataatgaaccataaggttctcccaagtgtcatacctcggaaaccatcgacgtaaaaacgccagattttcaggactgtattcttcataatagaaaatttataatcattacaaatataaaacttttatatattaaataacaaataaaagggcaaaaagttagtcatcgacacaaaaaagcattccgacgacgaaaaattcagaactgtctatctcttttgcggggcattttccgacaccgtatcttcgcaagcgttaaacaatatagcataacgaagatatgagaaacgtaagaagattgacagtgataacactctgcgtagcaagcgcctgtgtcggcagcacgacactgcgggcacaggacgccgctcccattgcatcgcaagagttaacggcatccgatgccgctcccgaagctgacactgcacttcccgctcagtgggatttgcagacttgcatcgactatgccttgcaacacaacatcaccctgaagcgtaaccgtatcagtgcggaaagcgcagaagtagatgtaaaaacggccaaggctgctctttttcccagcctctcggcaagtatcagccagcgcattgtgaaccgcccgaacagtgaaagcggtaccatcatcagtggcgacaacatcaccagcagtagcagtaagacctcgtacaacggcagttatggcattgatgccaactggaccctttacaacggtagcaaacgtctgaacaccatcaagcaacagcaactgaacaatcgcatcgccgagctcaacgttgccgagagtgaaaattctatcgaggaaagcattgcacagatatacgtgcagatactctatgctgccgaagctgtgaaagtgaacgaaaatacacttgccgtcagccaggccgaacgtgaccgcggacagcaattgttagaagccggaagcatcgccaagagtgaccttgcgcaactggatgcacaggtcagcacagataaatatcagttagtgacggcacaagccacccttcaggactacaaactacaactgaaacaactacttgaactggatggtgaaaaggaaatgaacctctatctgccctccctgggagatgagaatgtattgatacccctacccagcaagacggatgtgtatcaagccgcccttactttccgcccggaaatagagtcgggcaaactgaatgttaaggcatccgaccttgacatcagcatcgctaaagcgggatatattccgacattaagcctcagcgcaggtatcggtacaacgaatgccaatggcaacgatttttccttctccgaacaggtaaagaataattggaacaactcactgggactgaccgtaagcatccccatcttcaccaaccgtcagaccaagagtgccgtgcaaaaggcccgtctgcaaaagcagaccagtgaactggacttgcaggatcagcagaaaactttatacaagaccatagaaagcctctggctggatgccaacagtgcacagcagcaatatgttgccgctgccgaaaaactgcgcagtacgcaaaccagttacgatctgattcaggaacaattcaacctgggcatgaagaataccgtggaactgctgactgagaagaataatctgctcaacgcacagcaggaaacactgcaagccaagtacatggcaatactaaatgcacagttgctccgcttctaccagggcgaaggtatacagttgtaaccgcatgacgtaaacaagcctgtatgtcagcataattcagatatataatatatcattcaacgagataagaaataaacgagataagaaatataaggtatgagtaaaaagaaaattatcagcttagcggtcggagtcattattgtagccggcatagctatttgggcatttggcggacaagccaaaaagcggaaagtggtatatgagacggccaccgtagaccgcgccaacatctccaattccgtgacggccacaggcactatcgaaccggtgaccgaagtggaagtaggtacacaggtcagcggtatcatcgatagattgtacgcagactataactcagtagtaaccaaggggcagctcattgccgaaatggacaaagtaaccctgcaaagcgaattagcatcgcaaaaggctacttacgacggtgccaaagccgaatatgaatatcaacagaaaaattacgagcgtaacaaaggattgcatgagaaacaactcatcagtgatacggattacgagcaaagtctttataactaccagaaagcaaagagcgccttcgacagcagtaaagcctctctggccaaagcagagcgtaatctgtcctatgcaaccatcacctctcctatcgacggcgttgttatcagccgcgacgtggaagaaggacagacagtagcttccggttttgaaaccccgaccctcttcaccatcgctgccgacctgacacagatgcaggtagtagctgacgtggatgaagccgatataggcgatgtggaagaaggacagcgtgtaagtttcacggtagacgcttatccgaatgatgtgttcgaaggaaaagtgacacagattcgcctgggagccacaagcagttcaagcagtaccactaccaccactacggtagttacatatgaagtagtcatttccgcccacaatccggacttgaaactgaaaccgaggctgacggcaaacatcactatctacactctggataaacaaggagtactgagcgttccggcaaaagcgctgcgctttacgcctgccgttccactggtaggatcgaatgcagtggttaaagattgcgaaggtgaacataaagtctggactcgtgaaggtgacacattcactgcacatccggtcagcataggtatctctaacggaattgtcaccgaaattacaggcggcatcaacgaaggcacacaaatagtatccgatgcggtgattagcacaggtgccgaaaccactatagccgaaggccagggagacggcgaaagaagtcctttcatgccgggccctccgggaaacaataagaaaaagaatagtaaataaccagcgtagcgctggagcaaagtttcctttcggcatgcaagtaatttttcatttattcaacgaaacaattccgaaacaatgagcaaaacagttatagaattacaaaatatccggcgcgactttcaggtgggcgatgaaacggtccatgccctgcgtggcgtctccttctccatcaccgaaggggagttcgtgaccatcatgggtacgtccggctccggtaagtcaacgctgttgaacaccctgggctgcctagatactcccaccagcggcgaatatctgctggatggcatatccgtacgcaccatgagcaaacctcaacgagccatcctgcgtaaccggaagatcggctttgtcttccagagctacaatctgttggcaaagaccactgccgtagagaatgtggaattacccctgatgtacaacgcctccgtctcagcagccgaacgcaggcaacgcgccatcgaagccctgcaagcagtgggactcggcgaccgcctggaacataagtcgaaccagatgtccggtggacagatgcagcgtgtagccatcgcccgtgccctggtgaacaaccctgcggtaatccttgccgatgaagcaacgggtaatctggatacacgtacttcttttgagatattggttctcttccagaaactgcatgccgaaggacgtacgattatatttgtcacccacaaccccgaaatagcccagtacagtagccggaatatccgtctgcgcgacgggcatgtgacggaagatacggtgaacccgaaaatcctctcagcggcagaagctctggcagcgctgccaaagagtgatgaagactaataaatataaattatgaacggaacaaaccttttcaaaatagccctccgcgcccttgccaacaataagcttcgcgccttcctcaccatgttgggtatcatcatcggtgtggcatccgtcatcaccatgctcgccatcgggcaaggctcgaagaaaagtattcaggcacagattgcggaaatgggttcgaatatgattatgattcatccgggcggtgatatgcgtggcggtgtccgtcaggatgcctcgtccatgcagactctgaagctgactgattatgaagccctgcgggatgaaaccaacttcctggccgccgtcagccccaatgtatcgtccagcggacagctcatcgcaggaaacaacaactatcctgcctctgtaaatggtgtaggtaccgaatatctcgaaatccgccagttgagcgtagagagtggcgagatgtttaccgaagcggacattcagagtgccgccaaagtctgcatcatcggtaagaccattgtggacaatcttttcccgaacggacaggaccctatcggacatatcatccgtttcaaccaggtgcccctacgcgtagtgggggtacttaaagccaaaggctacaactccatgggtatggaccaggacgaaatcgtactggcaccttataccacagtaatgaaacgtatgcttgccgtcacatacctgcaaggtgtcttcgcctctgccctctccgaggatatgacagattatgcaacggatgaaatcaccaccatcctgcgccgcaaccataagctgaaagagagtgatgacgacgatttcaccattcgcagccagcaggaactcagcaccatgctgaactccactaccgacctgatgacaacactcctggcatgtatcgccggcatctccctggtagtaggtggtatcggtatcatgaacatcatgtacgtcagcgtgacggagcgtacccgtgaaatcggtctgcgtatgtctgtcggtgcccgtggggtggatattctctcgcaattcctgatcgaggccatccttatcagtatcacaggtggtatcatcggagtcgtcattggctgcggagcctcattcatcgtaaagaacgtagcccactggcctatctacatccaggcatggagtgtattcctctccttcgccgtttgtacggtcaccggtgtattcttcggctggtatccagctaagaaggcggcggatctggatccgatagaggcaataagatacgaataaaagggattagcggttagtgattagtggttagttgggaattccaatacgctacacagcaattaatcactaatcactaaacgttaatcactaaaattaattatttttgtaacatgattatgcaagactcccaaactcgccggattgtagaagttctcatccatatcatcggatggggaatcgttttcgctttcccatttctgctgatgaatcgtagcggatttacagtaagctgggtagactatttacgtcatggcagtgcggttccggtatcattcctgatcgtgttctacctaaactactgtttcttcatcccccgtttcttatttgagggacacatcaagcaatatgtattactgaatctcctgctcatactttgcacagctgtcggcgtacacttttggcaagatttcatcttccatacgtatgtgaaacccgaagctcacaaacgccccggacctcccagttggatcttcatcctgcgagatgtcttctcaatggttctcaccgtaggactggccgctgccatccgtatgagtggccgttgggtaaaagtagaagccgcacgccgggaagccgagaaaagccgcacggaagcggaactgaaaaacctgcgtaatcaactgaacccgcacttcctactcaacaccctgaacaacatctatgctcttatcgccttcgacagcgataaagcacaagccgccgttcaggaattaagtcgcctgctgcgtcacgttctctacgacaatcaacagaattttgtctctcttggcaaagagatggatttcatccgcaactacattgaactgatgcgcatccgcctctccgcaaacgtaactgtagagacacaaatagatattcgcgccgatagtcgtacggaaatagccccgctcattttcatctccctcatagagaatgccttcaaacatggcatctctcccaccgagcccagttttatccacatccatttcagtgaaagccccggtcgggtatgctgcgaaataaccaacagctaccatcccaaaagccagactgataaaagtggaagtggcataggactggagcaagtgcggaaacgcctggaattaacttatcccggccaatatgaatggacccaaggagtaagcgacgatgggaaagaatataaatcaatcttatcactctttaacattcaacattatgaatctaacttgtgccatagtagatgacgaacctttagctttagatttactggaaagctacgtcaacaaaactccgttcctgacattgaagggaaagtattccagtgccgtacaggctatgaaggaactgccggataagcaagtggatttgcttttccttgatatacagatgcccgaacttaacggtttggaattctccaaaatggtagacacacatacccgcattgtctttagtaccgcttttgaacaatacgccattgatggttataaagtaaatgctttggattatctgctaaaacctatttcttacgtggattttttgcaggcagctaataaagccgtacaatggtttgaactcttacaacagcctaaagaagaaatagaaagtatatttgtaaaaagtgactataagctggtacaaatagaacttaaaaagatactttatgtagaaggtttgaaggattatgttaagatttatacagaagataccgccaggcctattttatcgcttatgagtatgaaatcaatggaggaattattaccaacatcccgtttcatgcgggttcacagatcttatattgtacagaaagaaaaaataagagttattgatcggggacgaattgtgtttgataaaacgtatatccctgtcagcgatagttataaacaggtatttcaaaccttcctggataaaaggagctaggaaataacattcatttgtcgataaaatatccgaatctgtcgacaaaacataatttcctattgcatattaaaaaatgtttttttacctttgcatcgaacagataaaggaagttgtgaaacttcccccaatagaatagtttagttaagtctagtttagtttttgtgtgaagcacttcctccgtaagcgaacgataggaagtgctttttattttattgattttcaaaaaattaaaatctatattcaacacacaagaactttatgcagtatagttataaattgagcatacttcgctaacacaacctattttagaatacttactattccttggtcattattacgtctgtgggcactgagaagccacgaggaatccattcttctggagcaggaaccatatcttccgcataatctccttccaatgcataccacagacctttcttctcatctaacttccagtggagcttgttagaagccgtcaaatccattgtcccaccaagtattccttcaccattcaagtgcaatttacgctggtcataaaaagtgaaacctaaataattaggggttgtactataagcctcaatataaatattacacaatggtgcaaatgtataaatatcccatgttgttggtaatgttttaatatagttttctttgactattccctttacgctgagataataacctccaaaaataccaatacgcttatcttttccatgacttttcaccacacctttttgcagtttaattttaaagatagtatcatttttctgatatatccatgttcctacgaaagcatcataatttgcttgagaaaacacgcccatacaagtgaacacaagaacgaaaagtatgtaaatccgtttcatatctttcctgctcatagtattagaaaatttatgttgccagcttcccggatacaacggataaaaataaaaagtgtgggaacttattaatatcaataacactttctgaaaaattattttttgatacgcaccaaaaatacaaaaaagtaagaagctaccaacaaaataaataaagaagtaatcaataagcactatgaaagatgctaccagagccaaaaataaatgctcttttctatactgttcactaaaaatgattgatgccaatcatgaagtatataaatatctaatatccaaatgatttgcactttttttaatacacctggagacttttatttataacaagtaaaaaagaaatagagacatttctttcaaaattagcttcctttgcagttacaaggtttttggatagaaaacctaagatatatttgtagtatatatagtatatctcagttttggtcataaaaggttgaaactgtttgtttgttttgcagagatgcaccctttctaagcgtagtcagggtgcatttcatttttttatgagtgtaaaacccatactatttgattcccaagaactggaaaggttttgtagcaacaaactctttggcagtatttcccgcatacgttttaccggaaagaagattcaacttcttgacaggcgctttctctgagaaatccacatccttgaagtcaatccaaaatacattgggatataaagtagactcaaagtaataaactttatccttctgatcggaaactgtcctccatcgggttgaagaaatattcggctgatcaggagtgctgataccgaacggaacggaagtattgcgtatcacgctgaatacactggccaaggctgtacgggtatcttctgttttaggaatagcatttatatagaaagaagctctcacaaaacggtcggcagcacgattggtacccggcaaaaaagtggttcctccgatattcttccaataatcatcaagcgccagttgctgatcaaacacaggtgagtttgtcattacctgatatgctttgctatgatgaatatccaactttccgtccacatactcaaaaatagcattatcacccgtagcgtccgaaatggaaagatgaagggtagccatacgcgtaccgtcgggcatcatatccgacaccacatcgaaagtattcttttctacctcggcaacagcctcatccaccgttgcaaaattatcaagcatatattgcacccaggcggctatggacaaagccggtctctcaccgttccattggggataggatgattctgccagccacaacagattggcaacgagtcctttttcattcataccgtcagtgctacagatatcataagctgaagttatcacactgccgtatttagatttccaacgcatcgggtccttccctacctctccgttgcgctccatacctcgcgggaaaatccagatattactacgggtatcttctttccaatccatagtacgaccggttattatcatattattatccccctgatagactacacgggtacaagcattcaaatgatttacagatactccaaagagtgtaatcatgaataccatactataaagaacattcacttttcgcataattgattcatgttaagttgttagttaatttgcagtataaacaaacaatcacattgcaaagttcttaaaatgaatagatacatttccaaatttcgcagacatgagatcaaaggaaattgaaaggattagaaagcaaaacatcataataatagcaaaacagttaatatacactcatcatggtagcatttcaatatgtttagtgacatactatatttcacatatttacattccagcatattctatgaataaaatgattataacaatgcgctatttcagtatatacttgcagttttaactgctttttatgcagaaaagggttactacttatgattgatatggttactagatatgggcaaaaaggttactacataccaacaaaagggttactacatatcagaatttgacttattgatattatatttcccacttatcagtgcgtttatttcatccagaataaatgtaagtattttgataccgcattaactatctgacgtttattcattttcgtttgcacgcttccaatcctattgacctccggacagaaataacacattctcagtcaactaaaaatacaaattgtcaaaatgatgaatgccatctttgagaaataaatctgtggtgaacaaatattaaaaccgaaaacaaaccgtaaggaatactgttggaaggggaaacttaaaaacgataacagttatgaattacggtattagtatccttttcagggctatcccattgctgatggcccttttttgtttcggctacggaacctttgtgctcgacatggggacggacacgaaccgattcgttgcggggcccgtggtcttctctttaggaatgatatgtattgcgctgttcgctacggcaggtaccatcatccggcaaattatccacacgtatagtacggcggcaaaatatgccctgcccatcatcggctatctggctgccgtggtgtgtttcatcggtggaatgacatacattagtgacggcagtacggtagcccatttcgttgcgggacatgtcatttgcggagtagctttcatcactgcatgtgtagccactactgccacctcttccacccgcttcaccttcatcacgcaaaattccaagaagactgaccatgccgtacctgcaaagtcattctcttcggcacaggcggacatactcatcattctggctgttgtgttcgccgtcattacatgggtttgggcattctggttattgggacaaagtgatatccacaccgcttactatgtggccggacacgtaatggccggactggcatgcatctgtacaagcctggttgcactggttgctaccattgtccggcagatacgtaactcttatagtggtgccgaacggaaatggtggcccgccctcgtattggtgatgggtacactgagtatcctgtggggactttgggtgctgacgaatgccgacccgggcaagtcttccaccggatacattatgataggtctgggtttagtttgttacagtatatccagcaaagtaattctgctggctgttatttggcggaacgtctttaagctggcgaaccgaattccgctcattccggtgctcaccgcgcttacttgtcttttcctctctgcttttctgtttgaaatgacaacgctgaataatgtctactttgttcccgcacgcgtattggcaggattaggcggcatctgtttcacgctgttctccatcgtcagcattctggaaagcggaacgtccaattgatgataaatcactctctttttttataaatcactctcatgggtgggttggggtttcgccagctcatccataaacacttccacattccaggcatggtgcgccacataggcagccggaccggtatcacccgaatccagaatatcgcgcacaacgtttgacttgtttctgcctgtcacaaagaaaatcagctgcttggcattaaaaagcaaacaaccggtcatggctatgcgcttctgcccattgtaaggattaacacttacctcataaggatggaaagaagaaagcaaatactcctgaccggggaaaatggacgaggtatgcccgtcttctcccgcccccagcagaacaatgtcaagagccggaaagccatgccagagtggcgcattgcaacgcactatgcgagaatagctattcgcctcatcatcgggaacattgctgccgtcaataggaaaaatatactcctcaggtattcccacttcatccagcaacagccggcgcatattgccatagttactctccgagtcttcggcaggtacacaccgttcgtccacccaataaatacgcatacggctccacggagtggcatccttgaattcttccgcccacaaatcgaacatgagcgagggcgtgctgcctccactgaatgctatgtgaaaaatcttctgcggctcttcctccatcaaactaataaggtgcttgatgagagcgcgcgccgtttcgacagctgtactatagatataagttttcataactcacaatattgatcagtgttcgtaaggtttttacacggattggtccagtcggcaccatgttcgtgcatcatagcttcactttccagggggccccaggttccgactggataaccgtagagaggcgcatcaggatattcattccaatagcgcagcacaggatcaaagaaacgccaggaggcttcgacagcgtcactgcgggtaaagagtgtcggatcgccctgaatgcagtcttcaatcaggcgggcataagcatcgcccgtggcgcgtccgcccagttggtcgtaactgaagtccatcattacttgcttcacatcgaatcccggtccgggaactttcatgccgaatttcagcacaataccctcgttgggttgcaggcggaggattagtttgttagcccgcggacagtgtccgccatggcaatgaaacatctgatggggcgtttcacggaagtgcactacgatttccgtcaccttggtaggcatctgctttcctgtgcggatgtagaaaggtacgccgctccaacgccagttatcaataccgatcttcatggcgatgtaagtttcagtgcgcgagtcggcggggacgttcttctcttcacggtagccctttttagaaccggaagcggtatattgtccgcggactatatgttcattcaaatcttcatccgtcagaggtttcagtgactcgtagacttttaccacttcgttacggaaattatcggcggtgaagacagcgggaggctccatagcagtgagggccaccagttggataaggtggttctgtaccatgtcgcgcaaagcgcctgtaccgtcatagaagccgccacgctgttcgataccgagattctcgacagcggtaacctctacatattcgatgtaattacgattccacaacggttcaaaaatgccattggcaaaacggaaagcaaggatattttgtgccgtctctttaccaaggaagtggtcaatgcgatagatctgagactcttcgaaaacggaagcatagatatggtttaattcttgtgccgacttcaggtcgtagccgaaaggcttctcgacgatgatgcgggtatgtttacgattcaatccggctgttttcagatgtagagggatgacgccataaagtgagggcggcgtagcgagatagaacagtaaattgtccggttccttttcaccggtgatttcctgcaaacggctgtccagggttccgtaaccttcttctatggcagggtccatactaaggtagtgcaaatgagtgcagaactctttcattcccacttcggccggtgtgacaaaatgttccagctcgttcaggatatagtcgcgataagtttcatccgcatagtcggtacggccgataccgagaatggcaaatccttcgggcaaacgattatctttgtagagcgagtagagtgccggcatcagtttgcgtttcgtcaagtcgcccgaagcgccgaatatgatcattacaaatttactcatagaatcttgtttttttttgattagcttctgcaaattagcccttgtaataaattcattagctcttgctttataattttattaccagggcttcattttatacattataggtacctgattttgtatctccgccatatccggtccagttttcatggaagaactgtccgcgaagttcatcggtacgctcaaaggtatgtgcgccgaaatagtcacgctgagcctgaatcatattagcagggagcttcgcagataccagcgaatagaaatagttcaatgcggaagagaaagccggaacaggcagttcttctttcatcgcatgggctacaaggtgcttccaaccggagagcaactctttgatttcttcccggaaataaggagcgagcagcaaatgtttcggcttctgctgtgcctcaaaagcagccgctatatcattcaggaatatactgcggatgatacagcctccgcgccacatacgggcaatggatgccagatcgagatcccagccgaaagattcggacgccttttgcaacacggcaaaaccttgtgcataggataccagtttagaagcatacaaagcggaataaatatctttcaccagttccggcttgttatagaccacttgtgagcgctggcaaatgaattgtttggaagctgcctcacgcagatttttctgcgctgaaagactacgctcaaaaacagccgttgcaatcagtcccagaggcatacccaattccattgcattgataacggaccatttaccggtgcctttttgtccggcagtgtccagtatcttgtcaatcaggtaaccgcccgccttatccttatgccgaagaatattggctgtaatttctatcagatagctacgcaacttaccttcattccagtgggcaaaaacggaagccatgtcttcattattcagttgcagaagattcttcatcacccagtaggcttcggcaatcaactgcatatcaccgtattcgataccattatgtatcattttaacgaaatgtcccgagccggccggaccaatccagtcacagcaaggagtaccatcggcagcacgtgcagcaatactttgcaggatgggttttacttcatcccaagcagtaacggaaccgcccggcataatagaagcaccgttcaatgctccttcttcaccgcccgaaacaccggcaccgacaaagcggaaacctttcgattcggccaatgccacacgacggttggtatcttcatagtttgagttgcctccatcaatcaagatatctcccggagaaagatgcggaaagagttgttccatcagttcatctacggcactgccggcacgcaccatcatcatgattttgcgcggggtgaaaatggattctacaaagtcaggaatttcagtatatccttcaatacttttccctttggcacggccgttgataaagcgttctaccacaccttcttccactcccggaacagtacggttaaacacggacacatgccatcccttgtccgccatattcaaagctaaattctcccccatcacggcaagtccgattaagccgatattagtcttttgtcctttttctgtcataacttgcatttttttgttattgtttcattgaaatggaaacaatatgtcaagggcatttgttcgtatgaatttcgaataaaaatcgtacttttgcaaacataactctatttcaatggagaaacttaaattcagttttatgaaaaaactacatatcggcttactgccgcgtatccttatagccatcgcattcggtattctttttggtaattttcttcccggagaattggtacgcctgttcgttacattcaacggtatcttcagcgaatttctgaatttctccataccgctgattattgtgggactggttaccgtagccattgccgacatcggtaaaggtgccgggaaactgctgttgattaccgcactgatagcttacggagcaaccctgttttccggtttcctctcttactttacaggagtaactatatttcctcatctgatagagtccggtgccccgctggaagaggtcagcgaagcgcaagggatattgccgtttttctcagtcgccattccaccgctcatgaatgtgatgacggcactggtactggctttcactttagggctgggacttgcccaactgaaaaacgatacactgaagaatgcagcacgtgattttcaggatatcattgtccgtatgatcagtgcagtgatcctgccgttgcttcctatttatatatttggcatattccttaatatgacacattcgggacaggtattctctatcttaatggtatttataaagattatcggcgtaattttcctgctgcacatcttcctgctggtatttcaatattgtatcgctgcgctgtttgtccgcaaaaatccctttaaactgttggggcggatgctgcccgcttatttcacggctttaggtacacagtcatccgctgccaccattcctgttaccctggaacagacaaagaagaatggtgtatcacccgatattgcggggtttgtgatccctctttgcgccacgatacatttatccggcagcacgctgaaaatcgtagcatgcgctcttgctctgatgatgatgcaaggcatatcttttgatttccctttatttgccggtttcattttcatgctgggaatcacgatggtagccgctccgggagttcccggtggtgccatcatggcatctctgggtattctgcaatccatgctcggtttcgatgaatcggcacaggcactgatgattgcactctacattgcaatggatagcttcggtactgcatgcaatgtaacgggagatggggcaattgcactggtggtagataagatatataagtgacaagccaataagttttgtattctcgtaaaaaataacgaattttgctcccgcaaaaaataatcaataaagaagcctacaatatgaaaacagctttaatctccggaataacaggtcaggacggttcgtttctcgccgaattcttattacagaaaggatatgaagtacacggtattctccgccgttcttcttcattcaatacagggcgcatcgaacatctgtacttcgacgaatgggtacgcgacatgaagcaaaagcgcaccattaacctgcattacggtgacatgacggatagcagctcgctgatccgcatcatccagcaggtacagccggacgaaatatataacctcgctgcacagagccatgtaaaagtatctttcgacgtaccggaatacaccgcagaggcagatgccatcggcacgctgcgtatgctggaagctgtccgcatcctcggcatggagaaaaagacaaagatttaccaagcctccacttcggaactttacggtaaagtacaggaagtcccccaatcggaaacaactcctttctatccccgcagcccgtacggagtagccaaacaatacggcttctggattacaaagaactaccgcgaaagttatggtatgtttgccgtaaacggtatccttttcaatcacgaaagcgaacgcagaggagaaacattcgtaacccgcaagattacgctggccgccgcccgcatagcccaaggtttccaagacaaactgtatctgggtaatctggatgcacgtcgcgactggggatatgcgaaagattatgtagaatgtatgtggctgattcttcagcacgatacaccggaagacttcgtgatagccacaggcgaaatgcataccgtccgcgagtttgccacccttgccttcaaggaagtaggcatcgaactgcgctgggaaggtgaaggcgtagaagaaaaaggtatcgatgtgcaaacaggaaaaacgcttgtagaaatagatcctaaatatttccgccctgccgaagtggaacagctgttaggtaatccgacaaaggccaaaactcttttaggctggaacccgagacaaaccagttttgaagaattggtgaaaatcatggcagcacacgatatgaagtttgtgaagaagctatatctgagatcacttgaaaaataatatataaaaatcagaactataatgttaaacaagaacgccaaaatctacgtagccggacaccgtggtctggtaggctccgccatctggaaaaacctgcaagataaaggatataccaatctcattggcaaaacccacaaagaactcgatttgctggatgccgtttccgtacgtaaattctttgatgaagaacaaccggaatatgtattccttgccgctgctttcgttggcggcatcatggcaaacagtatttaccgtgccgacttcatctacaaaaacctgcaaatacagcaaaacgtcatcggtgaaagttttcgccacaatgtgaagaaactcctcttcctgggaagcacctgcatctatccgcgtgatgccgaacaacccatgaaagaagaagtgctcctcacctctccgctggaatataccaacgaaccgtacgccatcgccaagattgccggactgaaaatgtgcgagagtttcaacctccaatatggcacgaattacatcgccgtaatgcctaccaacctctatggtccgaatgacaacttcgatctggaacgcagccatgtgctccctgccatgattcgcaagatacatctggctcattgcctgaagcaaggcgactgggatgcaatatgcaaagacctgaaccagcgtccggtagaaggtatcgacggcaacagcagtaaggaagatatccttaccatccttgccaaatacggtatcagcaacagcgaagtgaaattatggggtacaggcacacctcttcgcgaattcctctggagcgaagaaatggcagatgccagcgtcttcgtcatggaacacgtagactttaaagacacctacaaacaaggtgataaagatattcgtaactgccatattaatataggtacaggcaaggaaatctctatccgcgaactggccgaactgatagtttccaccgtaggttaccaaggccagctgactttcgacagtaccaaaccggacggaaccatgcgcaaactgactgacccctcgaaactgcacgctctgggctggcaccacaaagtggagattgaagaaggcgtacaacgcatgtataactggtacttagggcggtaatgcattaaattcaccacagagtaacacagagttccacagagttttattaatttgaactcaaggaaaataaaactctgtggaactctgtgttactctgtggtgagattcatccggcaagctaaattgtacatcccctccgcttttttcagttaaaaatttgcattctttctataaagccttatatttgcacaaatttcaactaaatgtgcaatatataatatcatggaacaaagttttatcgcctatattgagaacagcattaaacagaattgggacctggatgccctgaccgattataatggggctaccctgcaatacaaagacgtagcccgcaaaatagagaaagtacacttaatcttcgaagcaagcggcatcaagaaaggagataaaattgccatctgcggacgtaacagttcacactggggagttacttttctcgctacactgacctacggagccgttgcagttcctatcctgcacgaatttaaagcggataatatacataacatcgtaaaccattccgaagccaaattactgtttgtgggcgaccaggtatgggagaatctgaacgaagccgccatgaccattctggaaggcatcatcctgatgacggatttctctatcctgatatcccgtacggaaaagctggattatgcccgcgagcacctgaatgagttgttcggcaagaaataccccaagaatttccgtaaggaacacatcgaatatcacaaggaccagcctgaagaactggcagtaatcaactatacttccggtacgacgagttattccaaaggcgtaatgctaccctatcgcagtctgtggtcgaatacagcatttgcatttgaggtattgccactgaaggccggggataagattatctccatgctaccgatggcgcacatgtatggcctggcattcgaattcctgtacgagttctccgcaggatgtcagatatacttcctcacccgtatgccaagcccgaagattatcttccaggcattctcggaagtgaagccgcacctggtggtagccgtaccgcttattatagaaaagattatcaagaagaacgtgcttccgaaactggaaacaccaaccatgaaactattgcttaaagtccccatcatcaacgacaagatcaagacaaccgtacgcgaaggagtagtcagtgccttcggtggacgttttgcagaagtcattgtagggggtgccgctttcaaccaggaagtagaacagttcctacgcatgatagaattcccctacacggtaggttacggaatgacagaatgcgggccgatcatctgttacgaagactggtcacgcttcaaaccgggttcctgtggtaaggccgtcccccgtatggaagtgaaaatcctttctcctgatccggaaaacatagcgggagaaatcgtatgccgtggacctaacgtcatgctgggatactataaaaatgaagaagccacccgtgaggctattgatgcagacggttggttgcacaccggtgaccttgcgctgatggatgccgagggtaatgtaaccatcaagggacgcagcaagaacatgttgctcggtgccagcggacagaatatctatcccgaagaaatagaagacaagttgaacaacctgccgtatgttgccgagagcatcatcgtacagcaaaatgaaaagcttgtcggactggtatatcctgactttgacgatgcttttgcgcatggcctgaccactacggacatcgaacgtgtcatggaagaaaaccgcgttgcgttaaacacagagcttccggcatacagtcagatatccaaaatgaaaatctatcccgaagaatttgagaaaacgcccaaacgctccatcaaacggttcttataccaagaggcgaagggataagaaaaagaaactaacctttataaagtatcatctcaaatgaaaaacgaattattactgtctgctgccatattgcccatgtgtggtatggcaggagaagcgattgcggcatctccgacaaagggagcgccgaaagaaaagcaacgtccgaacatagttctgtttttggttgacgacatgggatggcaggatacttcactgcctttctggagtcaacgaacgcattacaacgacacttaccacacgccgaacatggaacgcctggcagcacaagggaagatgttcacacaagcatacgcttgcagtatcagctcccccacccgggtcagtctttttacaggaatgaatgccgcgcggcatcgtgtgacaagttggacattacgcaaaaatacaacgcatgaacaaccggactctgtgatgatctatccggaatggaatgtgaatggtatttgtcaggaaccgggaatcgaacgcactacacaggtcactacgcttgcacaagtgcttaaagagaacggatatcagaccattcattgcggtaaagcccactttggagccaatgatactcccggagctgatccgctgacgatgggctttgaagtaaacatagccggacacgctgccggttcaccggccagttactacggcaagaataatttcggtaataagccggacgggaaaagtccgttggcagcagttccgggattggaaaaatatcatggtacggatactttcctcagcgaagcacttacactggaagcgatgaaggctttggatagtgcacaacaaaaggatgaaccattcttcttatatatggctcattatgccattcatacgcctatacaaccggactatcgcttctatcagaaatatctggataaaggacttccacccgtagaggccgcctatgccaccctcattgaagggatggataaaagtctgggagatctgatggattatctggaacgcaaccatctgacagaaaatacagtcattcttttcatgtccgataatggcggactggctgcacatacccgtgccggagaactgcatacacagaattacccgcttaacagcggaaaaggttccgcttacgagggcggtgtacgcgaaccgatgatcgtgagctggcccggtgtagtagctccggacactaaatgtggagattatctgatgattgaagatttctacccgactattcttgagatagcaggtgtccagaagtacactaccgtgcaacaaagggatggtatcagttttatgccgttgttgacaggaaagggtaaagtcaaggatcgcgatatctattggcactatccccatagttggggaccttcgggcccgggtattggggctacctgctccatccgctccggtgactggaaacttgtatattactttgcggacggtaaacgtgaactgtttaatattccggaagatatcagcgagaaaaacgacgtggctataaagaatccgcgtatcgtaaagaaattagcacagaaattaagtaactatctccggtcggtagatgcacagcgtcctacgcttcgtgccaccggcaaattagccccttggccggacgaaattaaagattgaaaccaatgagacgattatttccatccattattgcattactgatggttgcgggtacactccctgcacagaccactgacagtccgtcaacaacaaagaaagacagagagcccgtcggcatcaacctatccttgtggaagaacatgtctacacagcagactgatactgtcggcagtacctgcctcaacctcggtcttttttcctccatgaaccgcctgaacggcgtgggtatcaatctactgggtggagtggtgttgcgtgacatgaacggtgtacaaatcacaggacttgccaacttagtaggaggcagtatgcgaggcgtccagattgccggtatcagtaacgtgaatgggaataatctcagtggcgtatccatatccggtttagtcggtatcacgggaaatcatgcacaaggtgtcattttctcggggctcaccaatataacaggagacaacaccagtggtgttatcataggtggtctgctgaacattagcggtgagagctcttcgggtgtgcacctggcaggattagccaatattgcaggtgagagcttcaatggcatcaccacttccggacttctgaatattgtaggccaaagtctgcgaggcatacaaatcagcggcttgggtaacatcacaggagaagacatgcacggtatgcaaatatccggactcggtaacgtggtaggcggaagttttaccggtgcacaacttgcccccatgaacatggcaaaaagcggaaaaggattgcaaattggattattcaattactataaggagaacttcgatggcttccagttaggtctggtaaatgccaatccggatacgaaagtacagctaatgcttttcggaggaaacactacaaagctgaatgtaggtgcccgtttcaagaacaagttgttctataccatcttaggcggtggtacgcactatctggatttcagcgataagttttccgcctccctcttctatcgtgccggtctcgaattacctttgtacaagcagttgttcatcagcggtgacctgggcttccagcacatcgaaaacttcaagaataaagattacggtttccctgcacgcctctatgccctccaggcacgcgtcaatctggaatatcgcttaacagaccgcctcggtatatttgtcaccggtggttacggcggcagccgctactacaacaagggagttacttacgataaaggagtgatcctggaaggaggagtggtgctgtttaaatactaagtattaacgtaaattcgatataagaattggcgtataacggtatagtaatgaataagactcaccacagattacacagattcacacagatttattaatctaataatcagtaaaatagaatctgtgtcaatctgtgtaatctgtggtgagttcattcataacccgaaataatgagtcatttacgttattaggtattaaacatttgtcaatacattatgtgtagcagtcaatacctaatactcagtattcagttcttttcctttataaatcccgtcctatacgctaccagcaacttcttcaggtcctgtatctgcgttaccagtacttttcccttatcggtatctttcaccatcatgcgttgtgaattgaactcaacgacgaaagtattggatttgatatcctgtccctcttctattgctttctgacggctttggaacggttcatgttgcactagctgtaagccatgtgaatgatataccagcgtatatccggcaattccggtttccggctgatatgccttggagaatccaccgtcaatcaccagcagtttaccgtctgcttttatcggcttctcacctttgataatcttcacaggcacatgcccgttaatgatgtgtgaatgaggacctgtaacctcaaattccgcaagaatacgctcgcaaatatccgcacggttacgcaaagtataataatatcctttggtctccttagacagttctttatctccgatgaaatagcgttcaaacgttgccatcttatccttgtcaaacgatggagcatttgggccacaccacatataccacacataatccagcgcaaaactcttctcttccgtaccgtcttcatcaaaataagctgtacgtatcagctggtccgttttacacaataatttcttgccccaatattctttctttccgatgcggacacgcttgaaactgccatcttcattcagaggcatcgaagcatgatacaacaggttactattacaaatcagatacataccaccatacgtaaataaacagcgcatgtgcttcttcagcttttcactgttcatgaacgaagcatgaatcttatcaatcaactcccgttcctcatctgacaggcgatacggatcagccggatcaatcgtcgggaagttggtatcgcgaagcggatattcctttccttcgtacacaaaaacgcctttctcgaaatcaatcttttccagcaactttcggttctgcatgccaaactcaggacgacgatctataatctccgcttccagtttgaactgtatcaccgtaatggctttatgcatctgggtaatcaaccgcaaagtcttctcgttatagttaccatctgcgaagttcatcttcggtgcaaagattgtacagggatcatccgcataggtatccatggcaaacgtggcaagcggcagcaagttaatgccatacccgtcttccaatgtcgccagattagcgtaacgcatcgacatacggatcacattggcaatacaggcgtcattacccgacgctgctcccatccaaagaatgtcatggtttccccactggatatcgaagttatgataatcgcagagtgtatccataatgatatgcgctcccggaccacggtcgtaaatatctcctacgatgtgcagggaatcaatcgtcagccgctggataagattacacatcgcgatgatgaaatcatctgaacgcttggtagagatgatagtgctgataatcacattgatataggcatgtttattaggctctacactcgactcatgcagcaattcctgaatgatatacgaaaattctgccggaagtgccttgcgtacctttgagcgtgtatatttggaagatacattctggcaaactttcaccagctggttcaatgttatcagataccagtcgtccaggtcagcctcctgttctttaatcagttgcaacttctcttcgggatagtaaatcagcgtacatatctctttcttctcactttcacgcagggtatgcccgaagatttcattcacttttcgcttcacggctcccgaagcgttcttcaacacatgctgaaaagcttcatattcaccatgaatatcggtcaggaagtgttctgtccccttcgggaggttcagtatagcttccaaattgattatttctgtactggcatccgcaattgtagggaaactgcgtgacagcaactgcaaataacgcaagtcgctcatgatgctttcaggggtaatattactcatgatatctaattacaaattacaatttacaaattatatatgggcttgtgtcttcattccaaacctcaactctacgtttctaatcctcaactctacgtccccaatccttaactctacgttcccaactcttcactatcaacttaaaaagaacatcaacagcacttgtgcgataatcacacgcaggaacatgcacaaaggataaaccgtagcataagaaactgaaggattatcaccgggaatggtatcattcacataattcaatgccatcggattcgccatacttccacacaacataccggctaccgaaccgaagtccaccttcatccaacgaaaagcaataactcccataatcaatacaggaactaccgtcagcgcacagcccacagctatccacagcaatccttcgggacgaaagactgtatcgaagaaatgagcgcccgcgtccaggcccagacaagccagataaagcgacaaacccagtgcacgaagcatcaggttcgcactgcgtgtggtatacgtaaccatgtgcattctggggccgaaagtaccgataaggatacctacgataatcggtccgcctgccaatcccagcttcaccggagtgcttacacccggaatagcaatagggatagcacctagggcaagtcccaggataataccaacaaatacagccacgagattaggttctttcaggctcttcactgcatttcccagtactctttccacattctgtatagcagcggcctcacctactaccgtcaaccggtcgcctaattgcaaggtaagctctgccgtagccagcagcaatactccgctacgatatacacggctaatattgattccataatgattgcgcagatgaagcgaacccaatttctttccgttcagttccggacgtgtcaccacaatgcgctgtgaaatcagctggctgtcgatggcattccaatcaatgtcttccttgttccagtccgtattttcctgctcaccaaacagtacggttagtgcaggcacattcttttccgaggtgatgaccagcaggcggtcgccttcttttatcactttctcagaagtgggaatgctcacattcccatcccgccacaaacgggatatgacgaatttaggataactcaattgagctatatccttcacactcatattaaagattgccggattgtggacctgaaatgcaacgatatacggtttgttcgcatcgtctttctctttgatctccaagtcttccttacgaaccaacgccttgcgtatcatcagaataccaagaattactcccactacgcccaacggatatgccaccgcacatcccaaagccggcgtatttgcttcgatacccatctgtttcagagtttgctgtgcagcacccagcgcaggtgtgttagtagtagcaccacaaagaattcccaccatatccggcagcgatattcccagtccgtaacttcctaagagtgtcatcaccgtaccaatcagcactacccccacagccagcatattcagttgtacgccgcccgtacggaacgaactgaagaaaccggggccgacctgtaagcccaacgcatacacaaagattaccaacccgaaactctccgcatagttcagcatttgcgggtcaatagacaacccgaaatgtccggcaatgatacctgcaaaaaatacaaacgtcacgcctaacgatatgccgcaaatgtgtatttttcccagtcccaagccgatagcggagatcaacgagagtaccacaaccgcctgtagagcggaatgttcaacgaataaactgtataaccaatccaatgtgtttacgcttttaattgatttcggagtgcaaagataggaagtattcccggagaatgagaattaattgcataaaaaaagcggtcatcattatttgataaccgccttataccttgtacaccctcagggactcgaaccctggacccattgattaagagtcaattgctctaccagctgagctaagagtgcattatgctttttttaccgtagtggatacgagaatcgaactcgtattacatgcgtgagaggcatgtgtcctaaccgttagacgaatccaccggctgtttgcggaagcggggggattcgaacccccggtacagttacccgtacgtcagtttagcaaactggtggtttcagccactcacccacacttccttaaacctgcattgtttctcaaatgcggtgcaaatgtatgggaaacttttggactatgcaaatctttccatcatatttttttctgacttttttcaataaaagatgtaatctgttaaaagtcaaaagcaaagcatagaaaaaaaaagatgaaagagtgaaagaatttatgttcaaattgaaagttccatttatttcttttctgtacggttatgaattaattcaccacagattacacagattcacacagattttattttactgattattagattaataaatctgtgtgaatctgtgtaatctgtggtgagtcttattcattactataccgaaacgaattaagtttgatgcggtgcccctgaaaattgactcatatcaattcccctatccttccctttgcgtacctttgcgcgatttttcatcaccgtgtctcaaacacatacgaaatgatacatcaggaaagtttaaaaaagaggcttgccaaacttgccgcccctatttttatagaaactctgctcattatgatgctgggtgctgtagataccattatgctgagtcgccactccgatagtagtgttgcggctgtaggggtggtcaaccagattatcatgctcacttttctcgttttcgaggtcatcaatctcggaacttccgtcctttgctcccaatatctcggtgctcgcctgcaaaagaaagtagtgcaagtggtcggtgtttcaatccttgtgaacatagtggtaggcgtatccgtcagcctgctccttttctttggtgccggacctatcctgcgcctgatgggactgacttccgaactgatgactgacggcatggactatatgcgtattgtaggcgcgtttgccttcttccaagccatttcattaacgctttccgcctccctgcgcagtgccaacaaggccatttatccgatgttagtaaccgttgttgtcaatatcctaaatataataggtaattactcactcatcttcggtcgctttggttttcccgagctcggcgtagaaggagctgccatctctactgctttcagccggggtgtatctatgatacttttattcattatcctgtttcgcaaacatatccatcgcttccccgttgcctatttccgcccgttcccatggatagagctaaagaacctgatgaaaatcggccttccctccgccggcgaacaactttcctacagttcttcgcaagtagtgattaccttcttcatcaatatgctgggagtcgaagctcttgccacacgcacctattgtgtcaatatcatcatgtttgcctatctgttcagcatctccatggcgcagggtggtgccatttgcatcgggcatctcatcggagaaaagaaacctcatgccgctttcctcatgggtaaatatgttatgaagaaatccgtcatgatcaccgttatactctccaccatccttgctatattcggaaacacgatcttccattggcttaccacgaatgaagaaatcatccggctcggaaccaccatcctcatcatcgacgtcattcttgaaatcggacgtcccatcaatattttcgcaacaaatgccttgcgtgccgccggggatgtcacctaccccttctatgtcggtctggttgttcagtggagcgttgccgtcggcttgggctacatcatcggtatccctctggagtggggaatctgcggtatgtgggtcgctttcttgctggacgagaacatccgtggagccatcttcgtaaaacgctggtacagtatgaaatggacgacaaaagggtttgttaagtgattagtagcctgaacaatgctaatcacttatcactaaccactaatcacttaataagatttgatataaatcaaatcttttatacctttgtccccggaaacagttacagaaaccagcgaacaattatggatacactattaaaagaaacagttgatgccactgtgaactcccgttatccgggcatggcacctgaaggtagaaaactgatagaagatattctgatccgcaaagagctggaaaagggtgaactcttattcaaggagggacaagtctgccaccacatggtatttgtcggaaaaggcatgatgcgtcaattctattataaaaacggtaaggacgtcaccgaacacttttcctacgagggttgtgtcatcatctgcatcgaaagcacgctgaaacaagaaccgacccgcctgatggcagaggccctggagccttgtacagtctaccttctcccctacgacaaattcatgagattgaccgaaatctcctgggaaataaatatgttctatcgcaagatattggaatactcactcatcgtatcccaggtgaaagccgattcatggcgtttcgagacagcccgtgaacgctacaatatgctgatgcacacccatccggaagttatcaagcgggcgccattgtcacatatcgcatcttatttgctaatgacacccgaaactctcagccgtgtacgttcggggatattgtaagaaatacgataagaatattcagtttttgatttatatcaaatcatttttccctgaaactctctacctttgcgccatcagaaaagaaatagaattagtttttataggtaaaagagattagtttttagggtataaattaaaaaagaggtaacaactgaataaggttgttgcctcttttttcgtttacactacaaaaatcatttaaaaaacatgtaatgatgcaaattaatttatatatttgtacggatggaaatgaagacacacgtatcactactgaaaacaatattgtttcttacccttgtactggtcggatgccagggaagttcagataaagagacacctccggtagagctaccacaagaactattccgggatggggatatcgctttcagaagaggaacagggattaccagtagagtagtgttggctgcagaccgggaaggtgcttattcgcataccggcatcctgaaaaagaaagccggacaatggtatgtgatacatgccgtacctggtgaaccggattttaaggacgaccctgatcgtgtaaaaatggaaaccgtagaagtgttctttgagaaaagaaaagctgttaacggagctatcatgcgtgtatcaggagattcggtagccagataccgggcagcaactcacgcggaacatctttatgagagccatgtgttattcgatcatgattatgatttggcagacaccaccaagatgtattgcacggagttgatagactttgtatacagaaaagagggaatagatttacccgaagggcgtgtcagccacgtaaatattcccggattcagaggagattatctcctgcccaacgatattgcgcagagcaagcgtctctgtttgatatactatttttaaatacacattaatcactttaaaaaaaagcgtatgaaaaaggtattttattttagtctgatggttatgactatgtttttaatgacagcttgctcttcaagtggcccgggagatgctatgaaaaagtatggtaattacctcatcaaaggtgactatgagaaatttgtagacggacttgcattcgatgagagcgtaggtgcggagaaaatgaaagagcaaaaggacgggcttgtgtccatgctgaaagagaaagtttccaaagaatatgaaaaaaaggacggactgaaaagtatagagatcatatcagaagaaatatcggaagatggaaacaccgcaacagtaaagattaagcaaacctacggaaacggagaaacgcaggatggtacacaatcaatggtaaaaagagatggcaaatggctaatgtcagtagataagtaagcttttctttttgcttagtagagctcaccttgcccaacttccgtaaagagttgggcgagcttttctattactggttttacataatgtgctcctttttctgctgaagctttcctgggattccctaccccactatctatcgtagctttatcccaatgacgaggtgcccagcccaccttctcattcagcgaaggaatggcaaacggcttggattctccatcgcctgcttcatccagattcactaattccggatggtaatgcatcatcacagaagtttccgattcaccggcatgatcgtctatttcagcttcaaagtagcctttgggagaaacaatactgaaccagtcagtggctataatcaggaaatccggatagacaaaagcaaggtcacgtatcatgcctttgaagttattgcctccatgcccgctgataataatcaatttacgcatcccctgagcatgcagggaagctacaatatcttccagaatggcctgctgggtagagtagcgggtgtgtatgcagaaaggaagttcacgctgtccgggattatgagcaccaaaaggtacgggaggcatcaccatacagcgcacacctgaatgctccagtgccaaagcagcggcatctacggctatatcatggggcagaatacaatcagtaagatacggaagatgcagattatggggttccgtagcgccccaggggagtatgacaacatcatacttcacatcctttacttttccatagcaggatacagtaagatcaatttctcttttttccatgctttcttatttttgagagtatttgatagctgcaaaaataaagaatattccgacactgtgtactattgcttacgatattctttcggagacatacctgtgtgatgcttgaagtatttgccaaagaaagactgattggcaaaatgaagctcgtccgagatctcctgaatactcatttcagaagatttcaacagagctttggcttccaaaataacaagactgtcaatccattcaccggctgtctttccgctcacttcttttacagctgtagaaagatgcttggctgtgaggaacatcttgtcggcataataagccacacttcgttctaccttatatgattcggaaatcgaacgaataaaacgttcaaagagatcttctttccgagttttcgtttttctgaccgcaggctcattgccttgatagatactatatatctcataaaacaaagaaagaatcaatccttgtgtaatctctttacggaaagggttgtccttcagttttactttcttctgaaggaaagaataatattcctgaatggcatccatctcttccggtttaaggtgtacacagggctgttccttaatcatgaaaaacaaagggaacaactgctgcaccgtaggaagtacatcatcaatgaactgtccggatactacaatgaaaactccggtaaaatcatccgagcgctccacttgctgcaatatctgctcaggcagcgtgaccaccaggacaccagcggttagttcatgctctttcagattgatgcgtatccggcaatgccctttcaggcaaagtgtcaggcaagacgcattcagacgcgtagggtaaccaaacaagggaatatctcctatattgtcgaatatggcaaaatcattcccgataaaatccattgccggaaaacggcgaatagttgctatgtctacgttctttatatttttcatctccctttcttaattacgcggcaaacataagcaatatttcgctgaaaaccgtccgaaatctcctaaaaaaaagaaaaaagattgagatcgaagaaatcgggagtattctccatacggtctttctcgatattacagaaagctccttcaggagcatctaccggtgcatagtgaggaacgatcatcttaccggtgtagatacccgacaaagagaaatcaaagttcttcaacggcgcagaagagaaagtaaaataaccgtagtaatccggtgtacgcatcatacgtttggtggtcaactcttcatcatctacttcggtccaaacttcagctttcgtatagcggctacgctgtgccgtaaaacctaactggaactgcgcttctttgccatgagccagctttgcatccagattgacaccgtatacacgtgctccactaccattgcgacgttcttttatcttgtcaccgttctcatctttaccgatatcttccaacacgaatacatggcgcagatctgtgtagaaaccttccaacagaacgtttgcctgccagtgtccgaggtatgtactccaatctatagaaccgctgtaactattagagcgctcttcacgcagattgtcagccagcttaatctgaacgccctcaccgcctacagcggtcacatgcaagtcttcatcataagcctgtggtgcacggaaaccggtagaatacgtcagacgagcctgaaaatcttcagtcggcttatagaggaaattgacgcgcggactgaaaattagtttgtctatcagattatgcttgtcaaggcgggcacctaccaacatggtaagctgactcatcttccattcattctgaacaaaagcactggcaatacgtacatcctgcttcatatcacggtgataaccggtcatgacatcatgcagggagttattctgatattccaatccaccggtaaaagtggccggagcaaagaaacagttattcatattaccaacatacataccaccggcaacccaggtcagatcatcagtcttaccataagcattcaggtcttgctgagccccatagtaactgtttctgtctgtatgctgcacagagccgtaaagagatattttatgcttatattcacgccagaacagatcgtagctggcacctccactattgatgatgtgcttggtctgttctgtgatgtcggactcatggggctgcaaatcaaacttattgccaccgcgtcggaactcgttggttgtatgatattccaaattgatgcgactgaagtgtgtaggacgatagtaagcacggaaaccaaaggtattcatgttcagcttaccaagttcggagaagccgtcatcgtcacggtcatagggattacggttgcgatagctttcatacaaggcaataccataggaattatctttagcaaccaaggagacattaccgcccatatattgctcccacgactgtccgtccatgcacgaaaacatactggaaacttggaaggaattactaatagggtctttggtgataatattgatagtacctcccactgcattcgctccgaacagggcagagccaccaccacgtacaacttctacccgctctatcatatttacaggaatttgctccagtccatacacgccgctaagggcactaatgatcggacgactattaatcaaaatctgagaatacgggccttccagaccattgatacgcacctggggaaaaccacaattctgacaattgttctctacacgcaagccggactggtaattcagagtctttgccaagtcggtggagttcaccatctcaaaaagtttggtactcatcacattcaccacaaccggggcattcttccggctcacttcattgcgattggcagatacaaccacttcatcagtcatgaagctttcctccgccatcggaaagtgcacaactgcggtaaaatccttactgacagttacttctctttcctgtgtcttataacctacagctgatacacgaagtgtatattttccggcaggaagcttgcgaaattcgaactggccttcttcatttgagactgttccctggccgttttctttaatcaatatagttgcataaggtatattttcttctgttcctttcacaatcacgtgaccggaaatcatgttgccttcctttataggatttacagcatagaggctgatgcaaaccaccgtaagcaccagcacaagtatatgttttttcattaatttgcgctcaaaaaatgtatgtattgataaaaattaagtaacgcttaaaaaagaacttggtgcataagcaagttctgagagtaagctgataaattatcatttacgccgcgagcgccggcggagcacgaagagaaatagtctgttttccccctccttttatcaaaggcgacacctgttctgcttccagcactgccagaagtattcgcatggggtgcagatcttcatatacatcaacctccggagcctggaaagttgacaaacgaccaataacgagaagttcggatttggagtgtgtatgtttaccgtgaaacggatgggagtgcgtaatgatcactccattgacatagtgaacatgagtaaaagctgtaatacttgtctgatatgccacaaacagcaccaacaagcatacagctcctataattcttttcatctctttgttcacgttcctaccacccttttaaaatttgcgactgcaaagatagcgattatttttccacttttccaaacaagtattcataatcccttttggcggcaggctctacccattcttcgggaataaatttccattgccctaatgcatgtggctcaatcacaccctttttctctatatactgcatcaagtaataacgcagatctttatctgtagagaacaagatacgccctttcaattcatcttgaggaatcccggctcccttagtcaacaattctccaccaccattaccacggtatgaattcagtgctactttatacatcttgtccatagaaaaaggagtgccatcagccatactgataatagtaatcttctcccctttcggttttgttacatctaccgtatatatgatgccggctgccgaatcgaagttaaaactaaaattctggaaagaagcacgatccgttgcaccttcacgacgctgtttgcggaacaataacagatggtcatcagctgatttcatctgattcgtccacaagttatatgacatttccagcgcatccttcacctccttaccggacagtttcatggtatagagcatgttctcatacttatataagttgaacatatcgctcacaaacacatcccccttgttaatttccgtatcatacgacaggggcgcagcaagcgatatatcagcattggttatttcaagctgcaacaaatgaatcaggtcaataaaggcagaagaaccgaaataggcaggacgcgtggaaatggtctctgtgaagctgcctattttcttggatacaaaatcctgcaccgcattaaactggggagcaaaatgctccatgaaatcctcacttgcagcataatctttcatatccgtcaaagcaccgtcaatatacttctctatgacttttccttttcgaagtttcaaagtaacatctgcgtttgccacaacaattcccttgcttgcgggatccataatcaagacagaatctccggctatatttttaatcttcttcaattcacgggcatgatcgtgtcccatcaggacgatatcgaatccgggaacgttacgagctacttctacagaagcattttcacgatacttaccgcccatcagcaatgcatcctgtccggcatggaaaataccgatcaccagatctggcttctctttttcccggataatcttcatccatttgcgagccgtttcttccatatcatcaaagcgcagtcctttccataagttctccgacaaccatacaggaatagcaggagtaatcatacccaacactacgatcttcacgccatctcgctccaatacttcataaggtttgaaatgagtctttcccgtagccgtatcaataatattagcgcctaaaatgggaaacttgcagtcgtctgcccaacggtcgaacacggcacgtccggtctccacatcatgattacccatattgccggtattatactgcatatagttcaacacttcagctgccagatgcggagaaatagtgtcaatataattgtaataataggcacaaggctggccttgcagaatatccccgttatctaatagaagcaggttatctttatagacttcgcgctctttctgcacaaaagcatgtatgcgcgccaaacttcctccagcctcatggcggagtatgaaatcataaggataatagttcccatgtatatcactggtctctactattttcagctttacgatcttatcctgagctgatacagctactatcaggaggaatatccaccctaaaaaaaaggaaactctcttcatagttattagttatttctttggttgttcgatgtctaatggatgtgtaaacacaaatcttgccccatccgtgtatcccggatccacccagatctctcctccccacttctctacggtcaacttacagatggaaagtcccaatcctgtgccctgtacgtactcgttcagtttttcaaatcgctcaaatacaagcttctgtttctccaaaggaatacctgtacccgtatccgagacagaaaacaggacttctctttgcttctcatccactttcagtcctaaagtaatcttaccgttccgggtaaacttatcggcattggaaagcagatttatgataacctgttgcagacgctgagtgtcagtacgcatatccatgctttcacggtcgcactcaaagataaattcattttctgacttgcgagcctgactgacggaagccaaaacgcgttggcacaacggcactacatcacattcctcaaatgtaaacgtaacccggtccgcctccagacgggaaacatccaaaatatcatttatcaagcggagcagtaaatcagaattggttttgatgatatcaacgtacccctgctgttcatcttccgaacttcccccggaagccaacacatccgagaatcccacaattgcattcagcggagtacggatttcatgactcatatttgcgaggaaggcactcttcaaacggctggactcttctgcacgatctttcgcatctctcaaagcactctccgactcttgcagttcatctttcagctttttggtatggtaatagaagtacaatgaaacaaacaaccccgcagataacacgactaaaatggttgcaacagtccagatatgatatttatattgttcgtagaacgatggattttcattcaccatttctatcggctgatgaataaaagacagatccagacgcttttccttcacaatcttactatccatcatcactttattagagatgacttctacttctatacgatcactgtcagctccttgcagcagacggactgcctgatacgccatatccttgcccaatggccgataagagggtgtcaccccacctatagcccaataaccgataccgacagaactaatggaaaatgtaggtacatcacccgcagcttccatcatggtataagttgcattacgcataaaatatccgtcgtacatatccacacgccaagtacccatcaacaaagctgtattcggaggcaattcatgaagcttatcactgatggtataaatcgtattggtacgtccatccagtagaatcagatttaactccggatgtttcttcatctccgctactacatgggcttgcaaggaaacgcccccataactgttatcagaaacaaaagctatattcttagtattcggatataagtgttttatcagattgatattggcttccacatcatattcataaacaaaaccggctttgactgaagaatcagtaaagtcattaaagaaatccactgcaccaggcatccatgttttcagatttacagaatcatccggaagaataatggcattgcggcttgccaacgaagtcagtaccgggaactttccacgtatagaatctgcttgcgacagataggcagcccatgcctcctgaccaattaaaacaagtaatacaggcgcgcgctttccctcatacttatccagtatctccgccattttcgatttccactgtggcgactcggagaagcttttgcagttcatgttttccaaggctatcggagcttttccacccagacgctcaaactcttccatgaaatcgtatatatttccggaagtctgacgagcatccggattatacgaactgataatcagtactgggtgttctccagtcaccgcaaaggctgatgaaagcccccaaatggatatcagtaagaaaagaaaaaaactatatattattttcctaaataagcccattcagtgaatatagaattgtttcggcaaatatacaataaagttataaggatagaaaaaaagttgtagaattttaaactataaaaaaagaaacgggcggtaagagatagtttatcaagctaccgtcttaccgcccgttattataaaaaaacaggatatttttatttagatattcatcgcattgtttcctaaaaccggagactcatttttattttcccttttgaatatgcaaatgaaaataccttctcataaacaacacataaatgccactcaacaatacaattattcccaacaaataccaataaccatatctcacgaaacagaaataacctaatatgaccaaagcctgtgcccccatataaattaatgataccccaacatgaggtattttcaactcgtttgccatcaattgatacatgtgttttcggtggggcaaaccgatgttctcatgaagcatcaggcgatgaatgatagtcagaacactatcgacaccataaacggataacagaattatccaactgaaatcttctgttttaatgatgagcttccctatcagaaaaaggagaataaaagcgatactcacagaaccgacatcacccgcaaaacacttcgccttcttacggaaattgaagaaacaaaagaccaggactgaacaaagaacggtattaatcaaagccggttcaacaaacgtagtgatctcagaattgatataagctaatgcaccaaggataaccaatgaataaccacctgtgatgccattgatgccatccataaaattataagcattgatgatacccgtacaaataatcaaagctataatgatccaccaccaggaaagcgaaaacaagccccattggtaaaacattagagccatagcagtaaagtgaaacaccaacctcagaccttgggaagtagaacggatatcatctacaaaactgataaaagtgatcagagtcaatgccaacataaaccatggatactcccaatgattactcaggaaataggctaaagctccaaaatagaagattataccgccaccacgcaaagttatccgtgaatgagaactacgctcattgggcttatcaatgatattaaacttatcagctactctaaaataaaaaagttctgctacaaagagcagaactaatataatgatataatacacgatttacaatttataaataggttagaaactccgtattgttttcattattccatccgccgcacggacaggcatccggtcaatgccaagagctgattttatcttctcattacttactacgtaattctcagtcagttttctcagccgttctgtattcaaaggcaaatgaagcagcgtacccaagcctgcgcaaccttccatcatttttctgttcattttccagatgtgaggctccttacccatagcttcacacataagggctatcagttcattcgtagacaaagcttcatcatcacccatgtgataaataccgctcgctacgtcttttgtcaacaaaccttccacaacatagcaaagattatctatagaagtaaaagaacgcttgttctcaaaatcgcctaaaggccaggggatacctttctttaccacattataaagcaagttcagattacccttattaccaggaccgtggatcatacaaggacgcaagatatacactcgcttatcagagtatcttacattctcctcctccggagaggttgtttttccccgattaacgggggagttaagaggggataagtacccggaggaggtggtaggtaaaataaaatgctcctttatataactttcagctgcaatcttactttctccataaggaccaaccggagtcggtatcacatcttctgttagcatatcccccactacactgtctgcggcagctttcacagaactgaaaaagataaacttcttcgcagatgattctaaaaagaaatcaaatatcttctgtgtcagccctgtattgatatcaaaatatacctgagaagcagaccgattctttgtatcatgcgctttgcctgccaaatggatgatagcatcaaactttggtaattgttgcatgggaaaagaagttgtttcaatatctttccaagaaaaagtctttaccaccccctccttttcaggggcgacaatatcaagaccataaagggaatggtgtctttttaaggcaataacaagattagagcccacaaaaccgtgaatacctgtaattaatatattcatgattctcttattttaaactatctaattgtattataggaatagtatcccaatttatcagttcatccgcctgttccacattatagaattcatagtgatccaatagtcgttgaaacttagtaaacgcaccttttatacccacataacttttaaaacgacgtacagcaggtaagttcttcatgacaggttgtccttcatcaaaatctctcggatgaaaataagtcatcatgtaatcactatgtcttccccaatgattaattagccagtaaggaaacaaacggaagaaaccaccaccggaaaaaacaatatgtttgcccattatccgatggatgtttataggaaactctttgataatccttccatcaccaatatcaatgcgtttcggaacaccttctccataacttggcataccaccataatcatgaggagcaggaaacatcgaacagtcatatctgaatcccatctctgccaaacaataaagcgcccaagtattattcttagtgatagaaaatcccggggcacgaaatgcattcacttcctctcccgttacatcttctatcaggcgttttgccttcaatgtatcagctttaaatgtcttctcatcaaaacggaaagacaactcatgctggtaggaatgacaacctatatgatgcccttgcttttgaatagaacgaatcacatctggatgtctttccgcaatccagccaaggcaaaaaaatgttcctttttgattccgtttctccaattctgtgagaatacggttcactccctgatatatacgcacttcatgtttatcccaattgaaatcacctgagataaagtcgcaattataccagtcttcaatgtcgaaggttagtatattcaaaacaataatatttactagattattttacagaaattctctgaggaatttctttcacgaccttagcaggtctacctgcagcaactgtccatgctggaatatcttttgtaaccaaagaaccagcaccaactattgccccctcaccaatagtaacaccaggcataataaatgattccataccaactaaactaccctttttcatatggattatacctagtttataaccaagctttgcataatcatctccaacacaataattagacaaatctctttgatggcataacaaacgagtaccactagctatatgcacatgatcttctaatattatatgatctgcatgattctcatctacaacaacatgatctccaataaatactcccttacctaccttacagccaagtctcctcaatagaaaaggacgtaacattctcggatttattggttcaaaaataacccaattcatcatactcaataaaaaagcatgatacatgtttccaaaaaattttccaataactttaaatagactgacatcgccatattcctcctctgaataatttaaacctataaaacgaaggaaacgatatgttaaacttagttttttcatcatagttaattaaaaatcctctttgagtattcgacacagattatctatacagatatctttttggaattctctttcaaagtagcaacgaccattatgtcccaaagtttcaaaagcctccttattcaccagtacattatttcgaattatagtagccaaagcctcataatctcccgcaggaacagcataaccacaattagcttcttttatcacgtctgctccaccattaccaatcattgctaaaacaggtcttccagcagacatatatgcctgtaaacgtgcaggaactaccattcccaaatgaggaaatcctgatcgtaaagtaacaagcaaagcatcagcctttttaaagaatcccggcattgcttcaagtggaaaacgccctaatgtaaatgctgtatcactcaacttattagcttctataaaatgatcaagccattccttttcacttccattacctataaatatccatttcaagtcctttatatctcttaaagatagaatcaactgaacaactgcatctaaattttgggagtgccctaaatttccagcaagtattattttaaaaccatctggtaattgagggataggatattccgagtccgctttcaataaatcatcactccaattcggaaaatactttattttatcaataaaatctcctttagataaaatagattcagtaaaacgcttactactaattaagattctgtcacattgactatagatatttaccaccaatctatttacaaacgataagattttcttatttttaattccgccaccagacatcatggcatcaggccatatatctaatacccataaatataccggaacttttcttagtttccgcagaagaatagcaggatatgcttgaaatattggagagacttcatgtacaattattgcatcataatttctccaagcaaaataaaaaagtacattaaaacacgaagaaagaacaaagctcagatagtttatcattaactttaacccacctcctgtaccccgtggtatttgaaaggaacggtatacattcactccttttatactctcccgacgttttttaaagagaccatatccactataaattttaccttctggataattagggatacctactaatgcatctacttcatgtcctctcttcaccagctcaaaagcaatatcattacttttaaaattttcaggataaaaatactgtgttattagtaaaatcttcatttctattcaatagatattgagagcgaacatccatctatattcttcaatgctctcccattaaagaatattctttgcaatactctactacatttatatctgggaaattctatactaccaaattgaaatataaacggccatatatctttcttctctttgaagatttcacgccaacttatgccatcatccgtaatccacaaatgtgagtatctatctttattcatttcagatggttctactgtcgtcgaaagaaaagatatattccctaactgtcctccctttatggcagttccctgtatttttaccaatgaattaatttgcatagaatctctagcaaacattttgatttcattctgcacatattgagaatctgtagcaaaaacaacaaaatgttcataaaagaacaactgacacgaacgatattcttggtttcctctaaatacctcaactattgtcttaaattcatcctcagtatagccaataatacattcattctctctatctcctgtgcaaaaccataaccggtttgtaaattcatcccaaaataagccatgaatatgatttatattgccttcagaaaaagtgtaggctattttccaagtcaagccaccatcaatagatacatatacatgaacagcttcttttccaatattggcaaagtattcaccccaataaatatgcccattaggcaactcacacaaatttaaaggtctagatcctcttggtatagaaaacacctttctaaaaacagaagaatgattatttttatagaatatacctttctttgcaattaccaaatagcctccattttttagtgaatataatccatttatctcagcacgtaaaaatctccgaagtaaagaatatttagaaaaaaaactatatttatctatgacactagcaaaaaaaacatatttttttaaagaaaaatcatatttaaaaatttggtaacctttagaacctaagaaataatcatcagttacttccagaacttttatacctttaaacttctcaagaattgtcataatccttctctactttctccaaaccatcttgtttactactccagtataactctgaataagtttcacaactttagtcgatacattctcatccatataatcagaaacaggaacgccattatctccattattattcatttcaacagccgtatctactgcctgcaataatgacttttcatcaatgccagccaatacaaatccgcctttatccaacgcctccggacgttccgtacttgtacgaatacaaatagcaggaaaaggataacccaccgaagtaaagaaactgctttcctccggcaaagtcccactatcactcactacagcatatgcattcatctgtagacaattgtaatcatgaaatccaagaggttcgtgctgtattacacgagaatcaagtttgaatccacttgtagtcaaccgattacgactacgaggatggcaactataaagaatcggcatgtcatactttcctgccatagcattaatggcattaaacaaagaacaaaaattcctttctgtatcaatattctcttctctatgagctgacagcaaaatatatttccctttttgcaaattcaatcttctgtggatatctgaagactctatttcctgtagattctcatggagtacttctgccataggcgaaccagtcacataagtacgctcttttgcgactcctgaaacattcaaatatctgcgagcatgttccgaataacaaagattcatatcggagataatgtctacaatacgacggttagtttcttctggcaaacattcgtcaaaacaacggttaccagcctccatgtgaaaaataggaatatgcaatcgtttagcgcttattacactgagacaagaatttgtatctcccagtactaatacggcatcaggcttcacttgaaacatcagtttataactggcattaataatatttcccattgtggcacccaagtcatctcccacagcatccatatacacttctggtgctttcaatttcaagtcacgaaaaaaaatcccattcaagttataatcataattctgtcctgtatgagccagtatacaatcaaaatatttacggcatttatttatgacagccgccaaacgaataatctctggacgtgtacccacaataatcaagagtttcagtttaccattctcctgaaactcaatatctgaataatctaattttatgttcaatttattaagtataaattagtacaaataaccatcatctacctaaatttaaattaggtagttattctagttaatctattaaaacaaattataactgaagatgtcagataggcgagaggtagataaaaaacaactaaaatctgacatgagaaaatgatctctactgagaatatataaacttcactctgaacgtatttctttcgctttagaacgttgttgaagacctaaatcttcacgaataaatcgaagctttagaagtaattctttcataccccctatatcaagacgacgagtgttatgactatgataatcttctattttagcaatttctttatttccttcattaaaaaatttatcatagttcaaatcacgattatcacagggaatacgataataatcccccatatctatagccttagccatttcttcacgagtaacaagtgtctcataaagtttttctccatgacgagtaccaataactttcacttcggtgtcaccatacttaggattaatttctgcataaacctgctttaaagcttctgcaagcgtttcaagagtagctgctggagctttttggacaaaaagatctccattcttcccatgcataaatgcataaataactaaatcaactgcatcatccaatgtcatcatgaaacgtgtcatattgggatcggttatagttatagggtttccctgttctatttgctctacccacaatggaatcaccgaaccacgacttgccattacatttccataacgcgtacagcaaatagtcgtttgcgcattttcccccaattcacgtcctttggccatcgcaattttctccatcagtgccttgctgatgcccatagcattaataggatatgcagccttatctgtcgaaagcacaaccacattcttcacaccatgttcaattgctgatgcaagcacattaccagtacctatcacattggtcattgttgcctccattggaaaaaattcacaacttggcacttgttttaaagctgcagcagcaaacacataatctacaccacgcatagccacatcaacagaagccttatcacgtacattaccaatataaaatttcactttaggattttgtaaagcatgacgcatatcatcctgtttcttttcatctcgtgaaaatatacgtatctccttaatatctgaatcaagaaaacgacgtaaaactgcattaccgaaagaacctgtacctccagtaatcaaaagaactttacctttaaaaatagacattttactatttatatttataattacacttcaatcctctattaataactctacattatcccgtgaggcggtatcatttttgaattcatttagcagttccacagtcaatgtattagtaaaacaagcaattctactttttaatacacaatctgagaaattccaccattcaatttttattaatgtttcaataatgtctttagtaaatcgatattttataattttcgctggtaccccacctactactgcataatctggcacatctttcgttactactgcaccagcaccaataacagctccatttccaatcttgactcctcccataacacaaacattatttccaatccatacatcatttttaatctctatccttttgtatggagttaaaattgtatctgttcgccatgatgaacctgttgaatttatatgttctgtaaaaataggagatgttgataaataatttatcgtatgggatgccaagccaatattacaatttgaccctatcgaacaaaatcttcctatatctgtataagcaaccactgtacctggagaaacataagaataaccttctattttagaatttataatctttacattcctttttattcttgattttttatcaacaatagaaagatgatcaactaatgccaatagtgaaaccgcggaattaaatacattaaataaataacctttcaaatatcccatcataaacacaaatcaaaatcataagcatcaataaatgaattcggagtcctattaagaattgttacacctctataatttgcatactccctcaacatatcatgtgaattcatcattaaataaatccatctcaaccatttcttatagctacctttgggcatatatcgaatgttttcacttttataaaaatgcccatcgttcaaatatacacgatgagtagattcatcaacatcaaaatttttcatccatgaatgttctgctccatataggtaaatatgtttgaatcctgcattaattgcacaaaagattgctgcattaagaacattttgaggtaatggcatacccaacgattttttataaatgtaatgcgatatacccctaaaaccagaaacaggtgtctgattatattttattattttgacgcactcattatgcttcattttttccaaccaatctttagaaatatcacgaggcacaaacagtatcattttccatgagactttagctattgcttcaattagcttatttctttgctctaattgattggatgatcttcgtgaaagatttggatctaaaataatataataatttggctttaatgtaataaaagcatcagttagtgcaaaataatttacagccaacaaattcaatcctttaaaatcctgtttacaaataacatcttttaatgaaggcccattacatagaatatgaacatcataatcaaaaaacaatgttttctgaatatttttgaaacttcttcctacgccaaaagaactaaataatgtaacagataatacagaaacaaacatttccagcaatacagtaacaaatttataaattttcttacaagtagttttcatattataactctctataatttagttattcaaattcagtaatagtattaaatattagaagatgccaaaacaacattgaccagaacatcttattcaactatttatataaaaggaatgaaaaactttagaaataaaaagatccaaagcctctaggtaaaaccagtatttgaggctcttgttcctcatgatagcaaaatctgtaaaaaatttaatctaaggtattattttgatatattctattccttttttcattaaacttcactgctccaaaataacttttttatttcctaacaagattagaagactgtaatttattttgttgttgaattaatggaatagcgcatattaaaataaaaagccaatatggattcagccaaaaattccgaatagcccccaacaacaaatagcaacaaaacaaaacaaatccgtaagaagatctatttattataaatattttaaataatagtaatagcataatcaacaagccaacaaatccaaaataaacaatagtaaccttatatccagaattccctgtagtccaattattaccttcatgaagttctccatcaagacctaatatacactttttagattgaatatacttttcaaagttgtattcaaaatcttcacctgttctattatttccagcaaatcccttttcttcatcaaaaactaatctttctataataagtttcccgacaagagaatcttcacttacatattttatcgttagaaataaacccaatataaaaataaaaaaaaacagaagtatcactttactttgagatttcataattaacataagaaagaaacctatagctgtaaccatccaacccgccaatgaaaaagaacaaatcagactaattgttagaattattatatcaaatatctttccttttaagaatatatttgagaacaaaagaattacacaaattgaagccatttgtcccggttcaataaatagactcgtgaaacgttgataaaaatcaaattgagagttttcattaattaagaaaaaaaaataatcagataaaatatggtatccatcatcataatccgtaacgattttattaggtaaaggaatgcccatatgataaatcccccatccaattaaagaaaaacataaaataaaggaagtccctctcgatacaaatcctaagaatttcattttaagtttcaaagacatacaaatcaagacaactccagatagccatattaacaaatttcgtaataaatttcccaaattaaaaccaggagataatgctatatacaaagagcatatagaccatagtactaaaatagactgttccttcttggtaattctaaattccttcttattatgtgaataaaaaataatactcataatacttgctaggagaaaccatacgattgcatttatcttccaagtaaaagacaaataataggaagcacacatcataaagaaaaccgaaataaaatatggaaaaagtgctatatttttcatttttttcgatatttttcaatatagctattcacataataattcaaagtcgctctttctttagtactaattccaacaagataaataactatcaaaatatataataaagaaatagctatatacccgatcaataaatcaagacgaaagatatcttgtaatttccatctcaccaacaatggaactattatagcaataagagatgtcattcctaatttagatattagaatcagatattcttttatatttaagccaaaaaccagtttggcaaataaaattcttgctatttgagctaaaacagcaatagcaatcgcaactatcatcgtaatttgcggtgaataaccgagcttcagaaatatgtatgaaattggtagattcattatcactatagttcctgtcacaagttgaaaccatttaatatttccattagaacatatggcagtattcaatggaagttctaacgtctcaataatagttgcaataataactaaacgggtgaatagaacagtatggtcaggaacttgtacaagccatagtgacaaaatttcaggaagaatgattaaaagaggcaatgaaataatcagaacaagatagtaagacatttttgtcgtttgatagaccaacgaacgcatcgattctatctcaccagatgcatatctttttgttatttgcggcctgacagcctgataaaaactatttacaaaagtagtcataactgaacttatttggtaagctatccctctagcagcattaatgactggattaaaaaacatattcaacaacacgtttattccctgattttttattaactgtgacacagagccatacatataccaactacaataagaaaaaagttctcggaaacatacagtatcccaccgaggaataatttcaacttgtcgataacatgcttttacataaagtaaatatgcaacaatatttgctatcgatatgcttgtaaataatgcaacatataatatcaatttatcaccatccatataatggacaattccaattattactaacttcaacacagcatcaaatatacttaacaacacataaaagttcattttctcacttgatatgataagcgccataaacggaacactcatcatatttaaagagaaagttacaacagagaactgataaacccaaaatgctgcttgaaacctactatcaggtatgagaagtttgttgtaaataaaccataaaccacctgtttctgccaacaacacagaaataataataattccaatatacaccatcaaacttacactgaataacttacgtaaattcttattatctcccttacctatattatatgagaaaaaccgcattgttgcagaagacatcgaagaagaaagaaacgaaagcattgtaactataccacctactacattgaaaataccataatccgtctcccccaatacttgaagcaacaatctaacagccagcaaattgatgcacataattacaaacatccttatgtataagaatatcatgttcttaaacatcaattttacacgcttatccataaacaataatctattacgtacaatttcaacataccgataaacgtttagcctcacatcgttttagcgaaaaagtacaagtcatctaatttattttaatcagtataaagtttaaatcaaaagaaccttttactatctcacaattttatcttcgagaaataaattgagctttcggttaaattccctagataatacgaaatataaagtatatcaccttccaatacaatacccggatacgcactatctttatctgatgacagttcaagtagttttgttatcttgccattatctgtgtcaatacgaaacaaggatgtgcttttagcttttccattataagcacggccgactgcataaactttatccttatgaataaacagttttggacaccccatctgcattcccccatctttccattgccattgtttaccatcattactcatccccacataagcattctgctttcgtctcacaacagacacaaatttatttccccacctcaccactgatgcttccgtcggaaaattatcaatggtaggtttgtctactaattcataattaattccatcagaagatttcacaaaagcaaaataaggaacataaatataaccataagcagttccctctatccatgttatatcccacaaccaattccatttcatatcagacataaaacttataggtaatagctctgtatgcaatttattagaagagaaaaaactaacacatgtttttcttaaaacagctactttcttctcatatttaacttcctccaccagcaacataatctttccttccggtgtaactgtaagtttcggatcccgcaaatctataccatctacactatacgttaagaaggactgccaacgtttcccatcctttgaatataaaattttaacaactccaacatcttctccgctaggatcatagtgtttttttgcctctctaaatgcacaataaaatcgtccctcatgattaaccaacgatgtgaatgaagcataaggttttcccgtatatatctttcttgtagaaataatatatggagaagaatctttcctagcactgatacttccgacaggattcaaaacaattattagtaataagagaaaatttacaagtattacaaatttattttttatcatattcaatgtatccatgaccaggatataaacttaagttacgagacaattgtattattcgctgctgagagatctctgcatcaactcgattactattaggaaaagaagctatcactttcaagcctggtatatatgaatcaccactaaagaaacaaccacttattgcatagcataaacaacttttgtcatgccctggagtcgcatacaccgagacaaagctatcattgccagaaaagagtctcaatttttctccttcattaatagtaataatattccccggcctacagcaaatgatatcttctgcctccatgtgataacgtgaacaattcaatttaggtgacaataaagctgtttttccaaattcatttgtatagagaatcaactcaggatatttcctcaacagttcattaataccataaatatggtcataatgagtatgggtaaacaatacaccaactaacttttttccttcgggaatagcgtctatcactttatccgcatctcccgcatcaacaagccagcattcactactattcttcgtataaagcaggaatgtattggaattgtaaacagagttaattatctgttttatcgtcagcatatcttatcaactcaggaaaaaccccgtccgtagatgtatccataaccatagttccccatgccaaacctgtaccaaaggcactacacacaattttcttcccattaaacttttctctaagtttactaatgatcattaatggtatggatgtagatgatgtattaccaaaatctgtgatattatatatacacttagaatcatcaactttcagccgcttttgaataaacttattaatcatttgatttgcctgatgaatcaagaaatagtctacatcagccttatctactgctagtttagataaaagtgcattaatctctttaggagcagtatttactgcaaaagaaaaaatactatctccttccatattcgcttgaagtctatttctcaaaatatcatccttacacattacatactcaaaagattctttagttacagggtttctatatccaccatcaggaataatcaatgatttaaaattacttccatcagtatgcatatcaaagatgatcggtgaagctgatgtattaaattcaagagccgtagctgttccagcatcaccagccaacaaatttactctgtcataaggagatttagctttggtagatgtttcccctacaagcaatagccctttcttaattttcccagcactcaaaattgcagaaattgcggaaagtccgtaaatccaaccaggacaactcatcgtgatatcaaaactcatacagttagaagaaagctttaatctatcttgaaggacacatgctgtagctggaaaaatataatccggagtttgagagacaaatatcaagcactcaatttcttccttttcccaatccaatttctcaattaatctttctgctgcctctaaacacaaatcagaagaacaaattccctcttcggcaatatatcttcttttgactccggtggtttctatgtatttctctaattcttttttatcttctatgagaatagaatctatattctcaacttgcttcggaggcacgcaagcagagattcctgctatttttacattatctatcttaaaaaatgccatattcgttatctaatttccgataattgatcttgccagactcatttcgataaatttcatctacacattttacagtaaaggatgttaaagggagccctgtttttattgaaatgagctttttaacttgttcttcttttcctgcctctgttacatacacaaacattctatcatcatttccactacatgcacaatcaataaataatccatctgctattattttctcacattggtctaaactaactcgcagtccgaataactttaagaaacgttttttcctaccaataataaaataacagccgtcctcatccctaaaggctatgtcaccagtacaatattcacctttaaactcatcgcctttcaccagatcctctacagactccgcatatcccattgtcacattaggaccttgataacacaattctccctctacattagaattgactacaactttaccttggtcatcttttaatacaatagttcctcctggaattgcgaaacctatactagcacattttttagttgccaactcagctggaagataagctaatctagcagatgtttctgtagtgccaaaagttgcaatgaaccgcttaccgttatcagaggcatattttgaaaaatactcaaatagagaatttgaaagtttccccccgccctcagccattgtcttgagatatggcaaatccatttgagtaaatttcattttcttcaggatttcatagctatatggaactcctgtaaaattagttcccctttgttccttaataaaattccaaaagagcgggcttaagagatgattagaaagaagcaaaactgttgcgccagcatataaatgactattgataacattcagccccatagtatattgcattggcaaatcacagatccccctttcagtagtattccatccaaatacatttgcaacattttgagcattaatttctatgttgccatatttatgacgtactaatttaggacttccagtagtacctgaggtggttaataacaaagataaatcaggatttaaagcaggtgtatcattagttgttctatatagtacatagcctaaatattcttcaataatctccgtttccccaatcccttccatatttgaaggacaccatatatactcaggcttatagatattataaagattatcaagtaatcctttctctatactagcattaagtagtaaagaaacatctttattgtcatacaaagccaaaaatcccgccaatgatggtgcagtgtttttacataaacaaaacactaattttctttcaggaattttccttttcaaagcatcacaaaagattgttaagtctccatatgtcaatctattcccactatcatcaataatagcggttgatagcttattttttttgtctatatcaaaaatcatataaactaaaattcgatattacgcttcctcaaaatgtccaaacctgcctgataagaagtaaaagcaatgatttcatcaggttcaagttcaatttgaaactcatcctcaataattgccatcaaactcatttgtccaatagaatcccaacgttcaacagtatccatcgttgcactttccacactttcacagggaagttccaaaccttccacaaacgcattttgatatttctctaaatttgtcataactgattattttaacaaaaactcaattttactagctatctgttcagctgttaatccatgctgtttccaaatatatctcaaagaaccaagttccccgaatcgatcatttacacctattcttactaatctagcatgtaaattattatcacacttatattcggcaatggaactacccaatcctccaataatattatgctcttcaacagtaacaaccaaacgatgagtagagaagatagtatctaaaagtcctgtatctaaaggtttaatagtatacatatccaccacagtagcattaatattcttttcttttaacatttcagcggcatccatagcctctcgaaccattaaaccagttgcaaggattgcaacatcttcaccttttttaattatattagatttaccaatggtaaaatcacaatctttttcataaacaatagggcaatttaatccaccagacaaccgtacatagaccgggcctttaatcaaagaagcagcaataactaacttaattgcagccaaacagtcagaagctgaaagaataattatattaggcaaagctcttacaagtgcaatatcttctgtagcccaatgagacacagctaaggtctccattgcaaaaccagcagaatttcctattaacttaacattaaattgatgataagagagattttgacgtatcatctcaactgttcttgcaataataaattcagcataagtacaagcaaacacattactaccagattcagatgctataccagctgcaatacctatcatattttgctcggcaatgcccacattaatgactttatccggatagtttgcataaaatctatccaagcttgcaatagcaatactatctgcaactacaactctcaaattaggatcgcgtttagctacttcaagcataccaatgccggcagctgctcctttttgccctaatcttgcataagcttttataagtggagtactaataaccatatactctatgaatttaaaatttctgcgtaagctgttttatattgctcttctgacaatacagcctgatgccataatttattattctccataaacgaaacgccttttcctttaaccgtttcagctatcaaagcataaggcttatcaattggtctatattgtaatgagtctatcaactgctcaacactatgtccattcaccgttttagattcccaaccaaaagatttaaacttaagttccatatccatttgtgccatccaatcttctgtattgccatctactgccatatagttcctatcaacaatcacagttagattatccaatttataatgtccggctgtaaggacagcttcccaaatagaaccttcattacattctgcatctcccaaaagaacatatacatgatatggaagattattttgtttagcataaatagatttacctaccgcaaaggaaagctccatacccagacttaaggaagcatactctaagcctaaatccaaattcctttgatgaccaactaacaaaccattgtcttcttcatatgagtttaactcttcaattgggaaaaaacccatttctgccattacaggaaattcagccaatcgagcatgctctttacctgcaataaaacgatcacgtccttcccatcttggatttgaaacattatactttaaaatagaaccataaagtaccgcatagatttcaatacaggacaagctaccacttaaatgggctcctcgtcttccagcagccaacgccatatctaaagcatgaaggcgcatttttctacaaagatttatgagttctttagaatctaacttaccactttccataattatcgtcctccatcaactttaataatcgcaccattgatatatgaagctcgttccgatgccaagaataaagctacttgagcaatttcttctgttttacccagacgtcttaacgacgactctactgataactgctttaattgctcagtattatattgttgaatcatttcagtttctatcggtccaggagctatggcatttaccctaattccaagaggccccaattctttcgccaaacattgggtcataaataatacagcagccttactacttccatacgcaatcttacctggctgtggttcgatacctgcaatagagcccatattaattattaccccactcttttgtctgaccattttttttgatattttctgaataatattgagcatagaaaaataattggtatcaaacaacacttttacatcctctattttggtctgacttaacaatcctacagtagagatgcctgcattatttataagaatatctattttcaagttttcatcgaaaattttttttattccaatattaagtgattcatcatcagtcatatcaaaataaacaagttttatccaaacattatgtactcgctctagttctgttttccacatgatgaaactttcgctttctttacgcatgcatgcccaaatattagtaccggctttcgcaaacatttccacaagaaccttacctatgccacggttcgcacctgttattataatattcttacctttcatgcactatttcaacgatctaccaccatctataattaaagtatgtcccgtaatataagacgcagcatcactaagcaaaaaaataacggcgtaagctatttcaaaaggttccgcatatcttttcaacggatatttttgcatatccttcttataatcttcctcagaaaaactcaatttcattttcagatcagtattaaccattgaagggtgtacactattagagcgaatccccctcactgcaaattctactgcacaactttttgaataagccgtaatagcactctttgataaagaatataatccattcgcaggagtaaaagtatataaccctgccagtgaagacatgaagacaattgaagcatttttctttattttcttcctcttgtacaagagattagttaaaaagataggtgctttagtattaacagctaataccttctcatattcctcttcactgataaaatgcaacggcttcgtattcgaaatacctgcattattcaccagcccatcaattggatcaattaactctacaaaatccagaatctcattataattagcaagatttatctgatatacactacatttttcgctctccaacatacctaccgtttcattcaatgcatctatattaatatcgactaacagtagtattgcacccattttagcagcctcaatggcaatagaacgacctattccaccacctgctcctgttataagaatccgtttgtactctaaagaaaatggattatagttcattgcttagatttaacgatgctatataagtcttcaatagtttttgcctgtctaatgtcatcacttgtaataatgatgccatattcctcatccaccatagcaataacagataatactaataacgaattccactcatcattatctttaaaatcagtcaatgctgaaaagttactagtgtcaatgtcatcaaacaaatctactatgttttgaataaaattttgtaattccatattcttaaattattttattattaatatcaatatcacttaactgcaaaggttctcccataggaatgtatctctttgctatttgccctaacatctgttcataataaacaggcgataagccatcagcaggtctaaatgattttgtattctcaacggtaaaaatatcacctggattaatatccacaatggcataaatggctcttcttttagcccgttctctatccgagatttctctttttatccctcctaatgcactttccacatctcttacatcatccaccattttcttaaattcttgaggttccatcgaaaaagaagaatctggtccacccaatgatctatctaaaatgaaatgcttttctacaattcttgcacctaacgcaacagaagtcattggaaccacactccccatcgtatgatctgaaaccccaactacagtcttaaaagtagcaatcatatcaggaattgtcagaagattggcttgttctaacgacgcaggatattcagacgtacatttcaacaatgaaacatctttattccccatttcataacaagcatcaagagcgatctttatatcattgtaatcggcaacacctgtagacataattataggtttgcctactttagccacctgcttgataagaggtatatcatttatctcaaaagaagcaatcttatagataggaatttccatcttttgcaaaaaagccaccccttctaaatcaaatggtgtagaaaagaaatccaaacctaaccgttctgatatattctttaattccggttgccattcataaggcatataagcatcagcatataattgataacgggtaactcctttccaaagacctgattttatcataccgaaatgttcgttatttatatccataacaagcgaatccggcttatatgtttgtattttaactgcatcagcacctgaagctgccatcgcttcaatcgttttcacagccaaatcaaaattatgattatggttggctgacaattcagcaataatataaactctattctcttttagtttcatagaatcaccatttaacgggattttgtttgttgaatttaacaaactgatttattaatttatctcctgatagttttcgaaactcagttgcaggcgtatgcattttcacatatttccgaccatcaatttctataatcttatcctctattgctccaaagaacctggaaagttgatatgcattagtattaccccacaaaagatgcccaaaaagattttcaaatcccaattcgtcaaaaaacaattttttatagtaatactgcatttctatgcctataccagaatttgccatatacggtgaaaggtagtatccaggttctccttctttatgttcataatctacgtttatgatactcaacacccctattggtatattatccctataaaatagccaataatatgcatcattcctttttgacaaattacgtacaaaagcacaatgattttcaaacggaataatatcttttgttatcatccacttacgtatatcctcatgatttctccactcccaaactaacttcacttcttcaagagtaagacctacaaagtttttatacgtatagtcatttatttgataaattttatttcgatctatattcataacaaatgaaagattgagatatatttttctttttgttttgaataatcaataaaagatgctacgttcaaattatcacatgttaaagcctcagccaacgagtttagataattttcatcaagtagatttcctaatggtataatggaattagtctttaataaagcattatacacacctaactggttatcaacataatatccagaaagaacctttgtccctcttgataacgcctcataacagatcatactacttgataatatagcaaattttgatacgtcaaaaaggttagctatttcttgtgcggaagcatctatgtggactgctaatccttctgacaaaaactcacgaattctttcagtaccaataacactagaagctatgagatgaatttcatattgaagtttacaatttttcaaatacctaaatgttttttccgtcagtaaatattgatctgtacctccaaaacatattgtgatgatattagatgatatttttttttctgatttatatttcctaaatggtgcacgaagaataacccactcaaacccacataatattttagtatatggttcaacagaatactttgaaaaatcctcttctacataattaattagaacatctgaatagtgatgtatattatatggagccaaacaaaccaatttacatccctttctctttatttgtctctcatattcagatgtaaagaaataattatccaaaaaaactatttcattaccggaaagacaagaaagaaatacatcaaatttagtttcatcagacggaagagctacaagatcacaaacttcaccaactgctcgcttttgatattctgtcggttcttgagtataaaatacacactcaaaatcatcttttagcatatctgctaaagccaatgtacgaacaaaatgaccataacctatttggacattagcatctgctctaaataatattcttttcttcaatcttttattatataacagtaatatgaattaatatttcaggcatttacccgcgaacatacagcattttgtacttaatttctgccatcttccaatcttgttctgtatcaatatcttgcactcgatcttcgtcaaccactatccctcctcttttaatgtcaccagagagccaacggtcaatcttatgccaatagaatgtgcctgaatcatgataggcagattccaaatcctgactacgagttttagcatattccggccaattgaaatagatttccccctcactgttcataccatatgaacgcaatataggatatgagaactgtacaataggtactatagacgaaaaatccgagtgaatcaatctttcatagccaacaacaatatcctcattcagaagtaatggagaagttgccagaatacaacacatattatcaaaaaaatctccttgttctttatatctatccaatacttctcgaataacatctgctaatgtagcataatcatttgccgtttcttctgttctcaagaaaggaactgaagctccatattgtcgtgccacttctgctatttctaaatcatccgttgataccattacttcatcaaagagatgcgttgaaagagctgtttcaatggagtaggcaatgataggtttccccataaaaggcttgatatttttatgaggaatacgtttgctaccaccacgagcaggtataattgctatgttcctcatcaccttacaaattctaaaaccttttcaataacccagtcctgttcttcattagtaagcgaaggaaacattggtaatgccaaacacttagtgtagtattcctcagcaacaggacaatctccttctttccatccaaattgtttataatatggcatcaagtgtgccggtgcataaagaacttgggcaaagatgttattctcacgcaaaaagtcatacaaggcttttctattatcaacctgaataatatataagtgaaacgcatgaaggacattatctgctctaaaaggagttttaataacggttccttcaaaagctttatcatacttctttgcaatctccccacgacgagaaatactccagtccatccttcctaactgggagattcccaatgctgcttgaaattcggtaaaacggtagttataaccaagctcttgcatttcataataccatccgccatcatgccttgttaacttttccgaatcacgagtaataccatgagttctataaagacatactttttcgtacagttctctattgttagttgtaacagctcccccttcacccgtagcaatatgctttaccggatgaaaagaaaagactgtaagatccgcatatgaactattaccaactcggtttattatccctttactatcagtaaaggtggctcccggagcatggcaagcatcttccacaatagcaaaaccatattggtctgcaagttgcctcattctctccccatcaatcgggtatccagcaaaatctacaggaactacagctttatacgttcctttaggcgaagttttcagaatagtttccaatttatctaaatccatcaagaaagtttgaggatggatatcacaaaaagtaatttccgctccttgatagcgaaaaccattggcactagctacaaaagtatttggggtagtaataatcttatcaccgggcttaatacccaaagccatagcacacaaatgcaaagctgcggtaccattactcaccacacaagcatatttactattacagaattgagcaaatacactctcaaatttattaatttttggcccctgagtaagataatcagatttaagggcctctacaacagcctgaatatcctcgtcagtaatatactggcgaccataagaaatagtatggtctatcatatcattattttactttaaaacttgaacttacatatttacgtatcttatctctcaatgattcaacagtctcccattctgtattcgtatctgaaccataaacaaaatcttctgaaactaattcagcattgtaatgagcaagataagtctccttgttacggttatcggtaaatgctattgcaggaaggattgcatacgaattacctaaatcaatcgtatttattgcatcatctttcgttatcatctgttcgtgcaacttttcgcttggacgaacacctacttcattttgcaaaagattaggagctattgctatagccacatcagtaatacgatatgacggacacttcggaataaaaatttctcctcctaaatgattttgtatagcgaacattaccatatctactgcagattgctgtgtaacattaaaacgggtcatacgtttatccgtaatgggaagctcctttgcccccatatccctacgtgcaataaaatatggaataacagaacctcttgcccccattacattgccatagcggaccacagagaacttaacatcttttcttccttttatattattggcagccacaaaaagcttatcggctaacaactgagatgctccatataaattgatcggtgcacatgctttatctgatgataatgaaattatattttttatattacaaataagagctacatctatcacattttgtgctccgataacattcgtctttacacactcttccggattatattctgccgtatcaggttgagatatagatgcggcatgaattaaaatatcaaccccatcacacgcccttaacaaacgatccttatctcttacatctcctataaagaaacgcaactgaggatattgtttgtggggatattgctgctgcatagtatattgagcagattctccccgagaataaacaataatcttttttacaccgggataatcccgaaaaaccgtttctacaaacttttgtccgaaaaagcctgtacctccagttataagtatagatttaccattcagcatatttattttattctacaggttcaaaatatgtatcaggacgattgggatcaaagcaatcattactccaaataatagtaaccatatcttctgtttcagaaagattaatcaagttgtgagtgtatcccgggagcatctctattactcttaaattactaccatccacactataactgataactggatatttattaccgttctcatctacaccaacttttcgcaactgaataagaccgcagccacttactactaaaaaacgttcaacactattattatgccagtgttgtcccttagttatgccaggttttgaaatattaatagatatctgcccatgattttctgtttttataaactctgtaaaactcccccttgtatctatattcatattcagagcaaaagatattttggattccggtagataagatacaaatgttgagtagagagctttcttaaaagaatcacttacataaggcacttgaagagaagttcttcctctttcaaaagaattcaataaatcaacaatgtctcctaatctcacccgatgcacgttaggcacataacagaatcgcccttccctatattcgtcaccagtcaacgcgttaattaattcatccactacatcatctatataaacaagattcagcatcacattaggatcatttacctgaataggcaaatcattggctatgttattacaaaatgttgctataacagaattataattaggccggcaccatttaccaaaaagattcgggaaacgatatattaacacttttgcacctgtctcttctgcatattgaaacatcaaatcttctccagcttttttcgactgtccatacggattatctaatgcagcttgacttgacgacgaaatcataacagggcatttatttccatattttttcaaggtattaagaagcgtgaaagtgaaatcaaagttccctttcatgaactcactaacgtctttcggtctattagttccggccaaattaaacacaaagtccgcttttttgcaataggcttcaagttgttcaaatcctgaatcaatatcatactccattatggtgatattaggatctactttataccaacgagctctattagtagcaatattatttaattgcgcacagagattctttccaataaaacctttagcgcctgttatcagtatattcattcttcacacaattataagataatctttatccagataagcattacttacttcattttagggtacacattactctatttaaaatcgtcagtaaattcttcccaaggataaggattttcttctatattttttagctctttcattatctcaatttgatccaaagtcaaagaagacttatcccaagaattgattatgcaatgagcttcttgaatgagttcctcatcataaatttccccataacaataagttaacaaacgcaccttcagcaatgacgcagaaagcttcggaagcacctcccagctacgatccaggacattctgaatatattcctgcttgcagccattatcataaatcgttgcagcgaaagccactaacaaaccaaggcaaagttcagcctcctcttcggccgtagctccatgaatgttgtaaagttcgatagcccgttcgtaaacatcacggttcaaacgtgtaaattggtccgcataaatgggacttccatcaagcccgtaggttagaagatcatgggctaaggaaaataatgatgaagaattagaattcatattattaaatgttttatttcaaaaagagaagatacttcgaaagatttaagaggacacaatatttatgtatcaactaacgattattatcaacaacaatgccaatcaatgattaatgtcaatcaacagagtgtcaatcaacagttaacggctcaacaagcgaaggcgggataaaggtagtagctacagccatgacaccttcaatattgactaccacacggcgatcatggcgaatacggacaaactcaccgattacgcccttgaaaacaccatcagtgatacgaaccttctgaccttttaccaaattcagttcggctgcttccatataaagaattggctcatcgtgactaccggctaccagaataaaactgcgcatctgcacatcaggaataactaccggacggcaatgttcacgattcataatgaaacgtataggcatcgttccctcaagttcgtccttcaaagcatcaatacgtttgcgcgtagaatgaacgaagacaagattatgtatggcgggcaccaatctacggacacgcttaccacctttcatcaccattccatagcacataggaataaagctctctatgttctctttatcaagaatagacttaagagtcagttcacgactataagagacacgaacagcaaaccaatggagattttgagagttgaaagttgaaagctgagagtgagtactttcagtcatgatattttcgcaaagcaacttcgcgtaaggacattttttagggacaccggagtagtgaaatacctaccggtcaaattatgtaatgcgattatttttaataacttatgctgcattcatttcatttcagaacttcctaccatcgcggaaaaagaagctgtgaaacatctatgtggagcttttggagccaaaagctataaacgggtgattaaggaagattagttgtcttttaatcgttcgtttaatggacacctatatttgtaaagaaaacgtctcttgcaaaaacatcaagttgaatagatattaatgatattttttcagaatataaaatattatatatgagatacttacataagaaaaagagggcctgaagaaatatttttatcaaacattttggtcattcaaaaaataccttttacctttgcgcccattaaacgaacgttttttgaacacctatccgtttttactccaataaattatatatcagcctattaatcgtcgtaaatcagtatatataatcaatattattctaagattcttacttactctttcttttttacaataatcttcgtagcctgaaacatatttttccatcactaattcagacataaaaaatcatataagtatgggtaaaaggcaaatttaatagagctatacacaacaaacctcctgtgtacatctatggaaaaacagattgactatgattacacatttcttgtgcaaaaaaggaatatccataaacaataataataaacataaagctattaatgcagacattaatagatattaccgaagaatacaattactaaaattaaagaagtaagaaaggtctataaaaaaaatgcgtagttaaatcattattcacctcaatagccttataaacgtttaccagctgaaatatatggctgcaatagactgttgatgaacgctttgtgcctactcccttatgaattacatgctcttttacttgttattacatagccttttctttggattcagatccttcattttctattgtccacagctgtggttcatgtgcttcacagatgtgaatatgctgcttcattaatgtgaagcatgcaatccacaattgtagaccgcacatatacatcgtatataaatgaaagaaacacagattgctaacggaagaaacacaggcaatcaacacaagaatgaatagttccaccgacctacaccgaacgactgaagatatttactaagacgaaaaggcgacatattcgccaccttttcaataaataaaacacgaaaatgagggggactaaaacggccagtgtatgtactatataaaatataattaaatgatttacaataatatatacctatttcagcttaatgtaggcaaatttacctgcacgcaatttcagtttgctgccaccaccgctcaaaccacgatgaataaagcgatacagagcatgagtgcaagcgtgtaagtaaaagtgaccacaaactggttcttcgtcacttttggtggtaaatagtcataatccgtaaataactttcgctctcaacaattctattcctgctctgttatacattgtcctctttatgcatttaattctattaaccgtcccttcgagtaatgcattgctgtattcggtttgacttgcagcctttaccgcttgcttatcatcttctatattcgctgcgaatttagcgatagccttgcattttgcttttttcgctttcttcatccattcatccagagtagtgtctgcctctactcccttcagtattttcctgaagtctatgcataggtccaccgcgtgtgcaatggcttcatttgatttcatttttagatcaaacttctcatccttggttttccctttgaggagaaactccctaatgagggctacctttaccttctttttgatctttgactttttgagtttttcgttatgttccctgatttcttttctctttttggtatagacttccgttatagttctcatgagtcttgataccagatttgaatccagttttccttccattctcttgaccaatgtggctgtagatattattccatcactcactattttagccatttcagaaagatatttcatagctttcctttggttggtgttcagatgtactgagagtcctttcccctgcaggaggttgcgtacataagtcgcactttttcctatcgcggctagtatttcaggccttgtagccccttctattgtcatttgctttattttcaaatagttatttattctttccctatgccttttctctcctatgtcacacaaatccttaaacatatagtcataagcttcctctaatgaaggatagggataggagagcttttcattcgtctgataaagcgtcttttgaatgaattcagtcattcctttaagcaggttcttgaccaagtggaagcggtctgtaacctgaatcgctcgcggaagatgagtggatatggcccgtgcgtagtcatgagaaccgtcccgggttacaagctctatctgctggttttcttgcaaccattgattgagttcctcaccatagcggcagtcaaagatagccactggaaatcccgtatcctgatcgcatgccacacatttataaacatgcccttttttactggcaaaatcatctattccaatacgtgtacttgtgcatggagggtttgattcacccagacgcttcaccactctggtacacccggaggtactggcatggatattttgggatttcaaaaggagggaggcttttcgaccggacaggtacagcgaagtcttaagaatgcgctgttgtacttcatgagtcttgcgagcattagggccggctatggcaagggaaccggaaaatgtacgctggggacagtccggataatcacaataatagtagcgtactcgcacctgtattacaacttgcaaattaaaaagctccaggctttccaaagtccgaatgtagtatttgtggacatgatagcaaagtctaccacagtttgggcaggagcaactttgagaatgggtatcagcatgtaaagtacagcagcaatcagaaaattcaatattacgaatgagtaatcctttatccgagaatttatttttgaaccatttgcttatttgacaatagaggccactagttcgcttttttgtactatctttgtcttttgcagatatgttaatcatttggtaacttgttgaattgaagaaccataaagttactgaaataattacatatctgcaatcttaaacagacaatacatcactgtatatcagattattaacaataaaatatcgctttcttattttattcattataacagattttaccaccaaaagtgacgaagaacccacaaactaatagtataaaggctgaagctgaataatatgtttttcggctacagagatatcttttattcttttttcgtatctttggccctcattattcaaaaaaacgactcaacatgatacagttattccatcgcatgatttccgccgccctcggcatttccgagaagcaaatcggccatacacttgatttattggaagacggagctaccattcccttcatcagtcgctaccgcaaagaagctaccggcggactggatgaagtgcaaattgaagccatcaaaacacactatgagaagctgaacgaaacagccaaacggaaagagaccatcatcaacaccatcagcgagcaggggaaaatgactcccgaactgcaaaaacgtattgatgaaacatgggacagcaccattcttgaagacatctacctaccctataaacccaaacgccgcacacgtgcggaagtagcccgccaaaaaggactggaaccactggcgacattactgatgctgcaacgggaacccaaccctgagaaacgtgcggaagcatacgtcaaaggagaagtgaaagatgccgaagacgcactgaaaggggcacgagacatcattgccgaacaggtcagtgaagacgaacaggcacgcaacaccgtgcgttttgccttctcccggcaagccgtcatcaccgccaaagtagtgaaaggaaaagaaactgaagcagataaataccgggattatttcgaattcagtaaaccactgaagaaatgtacctcgcaccagttgctcgccatccgtcgtgccgaagccgaaggtctgctgaaagtcagcataagtcctgatgacgaggaatgtgtagagcgtctggaacgccgctttgtccgtagcaacaacgcttgcggagaacaagtggcggaggccgtacaagatgcctacaaacgcctgctgaagtcgtccatcgaaactgagtttgccgcacaaagcaaggagcaggccgatgaagaagctatccgggtattcgtccagaacctgcgccagctattgctcgcttctccgctgggacaaaaacgggtaatgggcattgatccgggcttccgtacaggctgtaaggtaatatgcctggacgcacaaggcaatctgctccacaatgagaacatctatccgcatgctccggtgcacaaaaccgcagaggctgtatccaaaatacaaaaaatggtggaagcttatcagatagaagccatcgccgtaggcaacggaaccgcaagtcgtgaaaccgaagattttctgaaacatcaaactttcagacaggacattcaggtatttgtggtgagcgaacagggcgcctctatctattccgcatccaaaattgcccgggatgagttccctgaatacgacgtcacggtacgtggagccgtatctattgcccgccgcctgatggacccattggcggaattagtgaaaatagatccgaagtccattggcgtgggacaataccagcatgatgtggatcagacgaaattaaaaaaatcactggatctgaccgtagaaagctgcgtaaatctggttggtgtaaatctgaatacggcaagtagccacctgctgacgtatatttccggtttaggccctcagctggcacaaaacatcgtgaactatcgtgcggaaaacggtgcatttacctcccgcaagcaactgatgaaagtaccgcgtatgggagccaaagcatttgagcaatgcgccggtttccttcgtattccacaggctgaaaaccccttggataatacggccgtacaccctgagagttattgcatcgtagagcagatggcaaaagacctgggatgcagcgtagcagaacttatcgccagcaaggagctccgcctgaaaataaaaccggagaaatacctcactcctaccgtgggtatgccgacattaaaagatattctgcaagaattggaaaaacccggacgcgacccgagaggtccgataaagattttcgagttcgacaagaatgtacgcaccatcaacgacctgcgcgaaggtatggaactccccggtatcgtaggcaatatcaccaactttggcgcatttgtcgacataggtatcaaagagaatggtctgatccatctttcgcagctggccgaccgtttcgtttcagacccgaatgagattgtctctattcaccagcatgtccgggtcaaggtgctgagtgtggatatggaccgcaagcggattgctttgaagctgatttcagaataatcgcaatagcaataatcatcaacgcggtgcacaggacagaaccttcgaacccgaatgcaccgccgttgatgatattctcttccggtaattctaaagacaataaagtaccgcccaatcgtcctccgcttacttcgaaaccaagaatcggaccttgcagccaattccagaaaagatgaagagcgataggaaaccataaattacgcgtatatatgtaggtagaacctattaaaatccctgccaacaaaatattcagaaaagcaatcagagaaaagttgggattaaaaatatgcatcagggaaaacaatgcagacgaaagaaacaatgccacaaaacgattgacacctgcggtcagcaaatgccccaggacaaaaccgcgaaaggcaatctcttctgcaagggcaaccagcaacattaatatccaagacagcagaaaatcgtacgcgctaaagtgtacggcagtaatttcaacctctcccaacccatataatattccaaatccgacagtatagatagccaaggcaacgaatgtaccccagaagatgtctttagcccgtcctttcagggataaacccaagtctgtaatcggaaggtggtcccaattcttcagcagaacccaggccgccaggaaagttcccgccagaaaactactttgaatgacaacttctttcaaaattccatctatcttaaaaaaagagaccgctttgatgcaaacagcccccaatactccggcaaatcccagcatcaaaagcatataaacgataacttttgctgcaacaaccagataaatgacaagtttcgactcttgcggggcaatatttatattttcgttcattgattccatatccttagtttctatatgttaataccccagcaaaaatacctataaaattaaaaatagaaagcaaattcctgcaaaaagcgtatatttgtctaaacatatctattactgtcatgaaactaaaacgaacattagccactataatgctggctgcatgtacttacgcagcagttgcacaaaatgcaggcacaccagctaataataaaactttttttgtagccaagcccggcactctggtatccatgctcactgaggatgaagccaacagcgtcacccatcttacattgaccggaaaactaaatgccattgacttcaaacatctgcgcgatgaattcaagaatctgaaagtgctggatatctccaacgcatctatcagtacatacgcaggtaaaagcggcacttaccccgaccgtttctatatttatccgcccaactgtgtaccggcttatgcattctgccagcagaccagcgacagtactttcaccggaaaagcaactctccagaaaataattctttcagagaaaatcaagaacatagaagacgcggccttcaagggttgcgaaaatctgaaaatatgccagttgagaaagaagactgctcccaacctgttaccggccgctttggcggatagcataacggccattttcgttccgttgggtagcagcgactcctaccgtggcaagaagcattgggacacctttgccgtgatagagggagaacctgtagaggctttcgtacaagtaggcttaatgggaagtcttgccagtgaattagtggctgcgggcttgcaaccgaaagatgtgaatttcctgaccgtagaagggaaactggacgaagctgacttcaccgtaatacgtgattatatgcccaatcttgtggctgttgatctgagcaaaagtaacactacggttattcccgaatatacatttacccagaaaaaatatctgttgcgcatccagcttcccaaaggtttgaaaagcatcggacaacgtgcattcagtggatgcggtcgcttgtgcggtacgcttgaattgccagccggagtgactgccatcgaatatggtgcgtttatgggatgcgacaacctgcgttatgttgtagctacaggaaacaagattacgactttgggagatagcctgttcggagaggacgggaggaataagctgatttataaataaacatggggagagtgaatgggaaaatatttctatcggagtatgaaaaagccggggttagtgctccggcttttctgtttacagacttcctattgtttttacgatttcgactctcaatcccagcgcattcattattcggtagaatgtgcctacgctcggatttattgaaccattttcaatacgggaaatgtaagatttggtagcattaattcgctttgcaagttctaattgagttacctttgcctcttttcttgcatcaagcagtatttgtccggtataaaaagcgtatgcttcttcatcgaacttagcgcgttcgggggttcccggtgctccgaactctttttcaagttcagcactaatgtctgttatcatactgttttttgtactcataatattcctccatcaatttaaatgctttttctatttctgatttcggcgttttttgtgtcttcttttgaaaaccgttaaatagaactactatttgcccttcatcaaaaatgaaaaagatacgataaatgttactattgtattctatacgcaactcatataatccgtctcgtatagattttataaatttcaccggtacacggtcgtcagtttcaagtaacgaaagcacatatttgactttctgaatttctttctctgtaagggtagcaaggaactctttataataatgaccgtatgctacaactcttcttctcatagtacaaaaataataaatgtttcaatatagtacaactttaaccgactttttcttcgatttcaaccactattttctttagctcctttattcgcaaagcaaaaaagaagaactatctgatcataagaacgcttaatcacctaaaaacatcgccttgcaatattcggttattgcaaggcgacatttttttattgaaagagcagacatttactgtgcgtacatcttagctcttaattccttaatatggtcagaagtgatgtattcatcatattccatcatcttatcaataataccgttcggagtcagctcgataatacggttggcaacggtctgtatgaactcgtggtcatgagaagagaacaggatattccctctatacgtcttcaggttattattgaatgcctggatggactccaaatcaagatgattggtaggagtatctaaaatcagacagttggcattgcgcaactgcatacgggcaatcatacaacgcatcttttcacctcccgacagcacacttgctttcttcaaaacctcttcaccggagaacagcatacgacccaggaaactcttcatataaacttcatttccttcgccaaactgactcaaccagtccaccaggttcagatccgtattgaaatactgagtattgtccagcggcaagtatgcagtggtaatagtgacaccccaactgaaagttcctgcatccggcttcatttcttcatttataatctcaaacaatgaagtcatggcacggggatcgcgggaaaggaataccaccttatcccctttctctatattgaagtttacatcgcggaaaagcacagtgccgtcttccaaagttttggtcagcccggaaacttccagaatctgattacccggttcgcgctcgggagtaaagataatgcccggatacttacgcgaagaaggcttgatttcttccacattcagtttctccaacatcttcttacggctggtagtctgcttgctctttgccacattggcactgaaacggcgaataaattcttccaactctttcttcttctcttctgccttagccttctggttctgctgctggcgcaatgctaactggcttgattcataccagaaactatagttaccggcaaacaggttaatcttaccatagtcaatgtccaccgtgtgcgtgcagacagagtcgagaaagtgacggtcgtgactcacaaccaacaccgtatgttcaaaattagccagataatcttccagccacatcacggtttccatatccaagtcattggtaggctcatccagcaacaagttatccggattaccgaacaaagcctgtgccagcatcacacgcaccttctccttaccgctgaggtcacccatcagcacataatgcttatcttctttaatgcccagaccgctcaacaaagccgctgcatcgctttctgcattccagccgtccagttccgcaaatctttcttccaattcggaaaccttcagaccgtcctcatccgtgaaatcttctttggcataaagcacttcgcgctgcttcatgatatcccacaaaacagtatgccccatcatcacggtatccattaccgtaagtgcatcccacttaaagtggtcctggcttaatacggagaggcgttcgcccggacctaacataatagaaccggtcgtagggtccaaatcaccggatatggcacgcaggaaggtagattttccggcaccgttggcaccgataataccatagcagtttccacttgtaaacttcaggtttacatcattaaataacaccctttttccaaactgtacggaaacattagagactgtaatcattgatttatttactatttatcgatttactatttactatttaatacctattgttctgtattttgcgggtgcaaagataggcatttttccatgaatactcgtagaaatgcgctgtcaatctgacataaaagtattacctttgcggcgttttagacaaatgctgcctatttggcaaagtttttgttagtagagcgatatactaacttaaacccttgacagcaatgaaaacaaatcctttttacaagtataataagaatagaaatatggacccgaaagaaaaagaaaacatcaacgaagaagagttaatgtccgaagctacgcaggatgaagccgcggaaaatgaagaaattcaagaggaggacgtacaggacagtgcagctccgacagaagaggaaaagcttgctcaggaactggaagaagcaaacaaagtgatagaagagcagaaagataaatatctgcgcctctccgccgagtttgacaactaccgcaaacgcaccatgaaggaaaaggccgagctgattctgaacggtgccgaaaaaaccatcagcagcattcttcctattgtagacgacttcgaacgcgccctgaaaaacatggaaactgccacagacgtagcagccgtgaaagaaggagtggaattgatttataataaattcatgtctgtattgggacaggacggcgtgaaggtgattgagaccaaagaaaaacctcttgacaccgattttcacgaagcaattgccgttatccctgcaccggacaaatccctgaagggaaaaattctggattgcgtacagaccggctacacgctaaacgacaaagtaatccgccatgccaaagtggtggtaggagaataacataatatatatggaaaaaagagattactacgaagtactggaagtcgaaaagacagcatcggtagaagaaattaagaaagcctaccgcaaaaaagccattcaatatcatcctgacaagaacccgggtgacaaagtggcggaagaaaaattcaaagaagcggcagaagcctacgatgtactaagcaatgcggacaagcgtgcccgttatgaccagttcggtcatgccggaatgagtggtgctgccggaaacggtggaccgttcggtggtttcagcgagggcatgtctatggatgatatcttctctatgttcggagatattttcggtggacgtggcggtggcttcggaggcggattcagtggtttcggaggcggattcggcggtggaagttcacaacgcccgcgtttccgtggttcggatttgcgcgtaaaagtaaaactgaatctgaaagagatttctaccggagtagaaaagaaattcaaactgaaaaagtacgttacatgtgatcactgtcacggttcaggggctgagggtaacggcggttcggaaacctgctcgacctgtaaaggtagcggtacggtaatccgtaaccaacagactattcttggtacgatgcagacacgtgccacctgtccgacttgtggcggtgaaggcaaaatcatcaagaataagtgtaaggtatgtgccggagaaggtatcgtttacggcgaagaagtggtaagcgtaaatattcctaaaggcgtaatggaaggcatgcagctttctatgagcggcaaaggaaatgccggaaaacacaacggcgttccgggcgacttactgattcttgtagaagaagaacaagacaaagaactgattcgcgacgaaaatgacttgatttacaacctgcttctcagcttcccgacagccgctttaggtggtgcggtagaaataccaaccattgacggaaaggtgaaagtaaagatcgaatcgggtacacagccgggcaaagtgctccgcctacgcggaaaaggtctgccaagtgtaaacggatacggtacgggagatttattggtaaatgtcagcgtatatgtaccggaagcacttaacaaagacgagaaaaaagcacttgaagaaatggaaagctcggataacttcaagcccaatacttcgattaaggaaaagattttcaagaagttcaagagtttgtttgactaaactgactttaaactgaaaatggattcatgtctgtatggttatgaatttgctcaccacagattaacacagttttccacagaattttatttctctgatttttaattaattaaactctgtgagaatctgtgttaatctgtggtgagcaaattcataactataccgttttaaacgatactgtttttttataattgaaagattctttgcgttataaaagaaaaaacgtcaaaactaaccccgttcatctggtagcatagtatagttttactatctttgccgacacttaattctatgagtagaataggtaacctgatgataattgatataactgatgagactaaaaacaattctgctaactacagtggctacaggcaccttgatgtgtgaacctgtgatggcgtatgctgtagattctacacccgattctatgggatggttccgaaagaaaaagaagagtgaaccaaacgacagtgttaaatccaaaaacgagtacgagaaactgaccggagacggtagcatcattcaccgtggtatgttcaatgtgtaccagaaaaagaacgactattattttgaggtaccggtgaacttactgggcagggatatgttggtagtgaacaaacttcaacgcgttccttccgaactgaacgaggccggagtgaaccgtggtacgaattatgaaaaccaaatggtacgcttcgaacaggataaggcgacgaataagttgcttatccgtcaaagccgccctctccccctcgctcctgccggagacgcaatcagccagtcagtacgtgacaactacatctcgccattgatagccggcttcaagattgaggcattcaataatgactctacgacgatggttatcaaggtgaatgatatttatgatggaacggagacgagtatcaacaacgtatttaccaatattaatctgggaacgtcttccatcaaaaacctttcacgtattctttccatcaaagcattcgagaataatgtagtagccacgtccgaactgacaacgaaagtgaccgaaggaacgacttccgtctacgtaaccgttgaagttagttcttcactgatgctactgccggaaacacctatgaccggtagactggataatgctcgtgtagggtattttaccaatcctttgctcagttacagcgacggacaacaacgggtcagcaagcaacagttcattacccgctggcgtctggaacctaaaccggaagaccgcgaacgttatctgcgtggcgaattggtggaaccggctaaaccgattgtattttatatagaaaactctactccgtatcgttggcgtaagtatataaaacaaggcattgaagactggcaggtggcatttgaacgtgccggattcaagaatgccattatcgccaaagaaatcaccgacagcatgacggtagatatggatgatgtgaattactccgtactgacctatgcagcctccaccaaagcaaacgctatgggaccgtctattctggacccccgatcaggggaaatcctggaagcggatatcatgtggtggcacaatgtactgaatatgcttcaggaatggatcaccgtacaaacaggtactgtacgtccggaagcccgtggcatcaagttatccgatgaactgatgggagatgccatgcgttttgtagcctgccacgaagtaggtcactctttaggattacgccacaatatgatgggatcatgggcattccccaccgattccctgcgctccaagtcattcaccgaccggatgaattcgacctcttcttccatcatggattatgcccgtttcaactacgtggcacaacccggtgacggaataaccgctctttcaccgcatatcggtccttacgatatcttcgccatcgaatacggttaccgttggtatggaaaagaaaatccggaagaagaaaaggatttactttatgatttcctgagccgccataccgaccgtctgtataaatacagcgaagcgcaggatgtgcgtgatgccgtagatccccgtgcacagaacgaagatctgggtgatgatgctgtacgttcttcccaatatggtattgcaaacctgaagcggatcgttcccgaaattataaaatggacgacgaccggagaaaaaggacagacttatgaagaagcttcccgcttatactatgccgtaatcaatcaatggaataattatctgtaccatgtactcgccaacatcggtggtatctatatagaaaatacaattgtgggtgacggacagaagacttatacttttgtagaaaaagaaaagcaacaagctgccctgaagttcttactggatgaggtactgacttatccgaagtggttattcgacacagaagtaggtgaatatacctatctgcttcgtaacactccgctgggtgtggtagaaaatgcaccgacgcagatactgaagaatgcccagtcctatattctgtgggatcttttatccaacaaccgcctggtacgtatgcttgaaaacgaagcggtaaatggcaaaaaggcttttactgccgtagaactgatggatggtttacatcgcagcatttttgccacaacagaacggggagcattgcctgacgtcatgacacgcaccttgcagaaaaacttcctggatgccttgattacggccgctgccgaaagcgaaggggtaaaaatcaacaagaagcttatggacaatcatttcctgctggataaccagttaccgctttgcagttgtgatgaacatgctcatcgctcgttggatgcagaccggatgggtgcccgtcgcgaattgaacttctacggctctcaactgaaccgcatctcagatgccatttccgtgaagcgaggtgaactgttgcggatcaaggatctgcttcaaagtcgcctgggaacatcggatgtggcaaccaaatatcattataaagacatgattctccgtattaacacggcattaggaatttagcaatgcttaaaaaataagttggtacgaatgaattcaataacagcagtaactcagctctcctcctcccgggaggaggaggggaactgagttacttttatttgtgacatattttgtaccaagttatttttttatcgtcacttagctaaaaaacagttttcaatttaagtattaattttattattttaacggatgaaaagacgcttatctgtcgcattcctattactaataggaacgttcacgtacgcccttgccgcaaaccggcaggtagagggtgtagtcatctcttctgaggataatttgcctctcatcggcgcttctgtctatgtgacagccgatgatttgaagaaagttgggaataatcagtccaccattggtgtcattactaatattgacggtcaattctccatctccattccggagggagttacccgtttttattgtagttacgtcggctatgatgtgctggaagtaaagctcataccgggcaagaataaatatgatattactctccaaccttccgcccacatgctcgatgcggtagttgtgacgggatatcagactgtggaacgccgtaagttgacggccgccgtatcgaagatcgatatctcggatcagatgatgggtgcaaccaagagtatagaccaagcattggccggacagattgccggactttccgtaagcaacatttccggtactccgggtgctcctgccaaaatccgtattcgcggtacatcctccctgaatggtacgcaagaccctttgtgggtgctggacggtattccattggaaggaacgaacattcccaatatggaagtattgaaagacatcgataacataggtcaaaccgctattgccggtctgaatcctgccgacatcgataatatcaccgttctgaaagacgctgccgcaactgccatttacggtgcccgtgctgccaatggtgtaatcgtgattactaccaagaaaggtaaagtgggcaaaccggttattaacttctccactaaactgacctattctccgaagttgaatatagaccgtttgaacctgttgaactcagaagagaaggtaggtctggaacttgacttactggcatccggttatccatacagggaaaccaaaggcgaggtataccgcattatctccgggttgggagaactcaacaatttcaaagacggagggtggaacgccttgtcatccagcgctcaaagtgcaataaataaactgaaggcaacaaacacagactggagtgatatccttttccgcgacgcattcacacaagagtataacctgtctctttccggtggtagtgaaaaggcaacttactatacttctttcggatatatgaaagagaatggtaacgttccgaatgtatctgccgaacgtctgaacttagtgatgaagaccagttataaagtgaacagcattctgaaagtaggtgcttctatgtttgccaaccgccgtaagaattcaagttatctgccggattcggatggtttaaccaatccgatattctattctcgcctggctaacccttacttcacgccatacaacgaacacggtaattacaactacgacattgacgtggagaatgatgtggatatggactttggattcaacccttttgaagaactaaaaaacactaccaacgaaaccactatcaatggtctctcatctatttttgatgcagagttacgttttgacgaccggttcaagtttaccacccagctcggtttacaacttgacaaaacatccatcgagaagattgccgatgaagaatcttttgccatgcgtaaagaaaagaagaaccatcgcagcaatggcgtaacttacctacccgccggaggatttcacaaggccaatgaaaattcattgtcccaactcacttggaaagcgatgggagaatatcgcgatacctacaacgacatccatgagttcgaagcaatggtaggaacggaaatccggaagacatgggaagaaaagctatacagtgccggttatggatttgaccggaagacgctgacaacaaagccgatcatcttcccggaagaaagtcaggcattcaagttgcatgagaaggctcatgtggagaatgcatacgtgtccgctttctcaaccctgtcctattctttactgaaccgctatacattgggaggaagtatccgtttcgatggttccgaccttttcggtgtagacaagaagtaccgttatctgccattatattcagtcagtggtttgtggcgcatttcccaagaaccttttatggcaagtgccaaatggatagacaacctggtagtccgtgcatcatacggtttgcagggaaacattgacaagaacacctctcctttccttttgggaaattacagaattgaaaatatcctgccgggaggttcagaagatatgattgacgtttccggtgcaccgaacaaaaagctgcgctgggagaaaacacattccgtaaatgcaggattcgattttgctgtattgaatcaggctatcaacctgagtgtggactactactacagaaaaggtgtagatttgatcggaacccagatgttaccgctggaaacaggtttcgaaatgttgaccgtcaactgggccagcatgcgaaatcaaggtgtcgaagtcgctctcagtacacgcaatgtccacaccaagaattttatgtggaccactaacttcaacttcgcatacaataacaataaggtactgaaggaagcactgcgtgaagatgccttagaaccgggccgtgaaggatatcccgcgggagccttgtttgccctgaaaacagccgggctggatgaagaaggttatccgatgttccaggacaaagacggaaaagccgtatcggccatggaattctttaaacttcaggaatggggattcggagcaaccgacctgacagcccgcgagcgtcgtgaactttacacgtatgttggtactgctgactgcccttatacaggcggtttcaataatactttcacctacaaggcttttgaactgggtgttaacttcagcttcgacttcggtggaaaggtacgcagtcaacccacctactctatcgttgatttcgacaaaggacgcaacacgaaccgtgatatcctgaatcgttggactccggaaaatacggaaacgatcttcccggttctgctgagtcagaacgaacgtctggacgaatatatgtggtattcaaatcagaatgaaatataccgtaacctggatatttggatcagagacctgaactatgtgagactacaaaatatccggttgggctatacattgcctactaacttcagccgcacgttgggaatgacttccgccacagttgccatagagggacgcaacttattggtattcggctcaagctacaaaaattatctcgatccggaaaccatgtccaatgcttatgcaacaccggctcccaagtccgtgaccttaagcctgaacttgattttttaattttatagagagtaacaacaatgagaaagatatatatcatgttattgatgagcagtgtagtattgctgactgcttgcgatatgttggatatccagcctacgggaaaagtgatcccccagaccttagctgagtacagagcgctgattgccacagcatataaaaacgttcccgatgccagaggactcgcctgcttccgttctgatgaactgtatgtaaaagatgatagttgggaacaggaccgttatggtaaaatagaatgttgggatgacttcagtgctccgggacagactacttcctttgaatggaagaatttctatagcatcatgttcaccgcaaactataccatagaagagcgaaactcaatcaatgaaggaagcgaagaggacatcgaccaattgatcggtgaatgttatctgctccgtgcatacatgcatttcctgttggtaaatctctacggacagccttatacccgtccgggagcgttagaaacgaaagcagtgccactgaagctgaacagcgatatcaacgaaattctgaagaaaaataccgttgcacagatttacgaggcggtactctcagatatcaatgaagctgaaaaattgattaataaggaatcctgggaacagaagttttcttatcgtttcacaaccctatctgtaaaagctctgcgcgcccgtgtatatttgtatatggggcaatgggagaatgcgtataaagccgccgaagctgttcttaccgggaaaaatagtctggaagatttcaatgacgaagcctttatgctgccaaaccactatcagtctgtagagaatatcacagccttggaacgcggcatgagctccaactacactcaggcagcggttctgtccgaagctttagcgtcttcatacggagaaggagatttgcgtctggatgcttacttcaaaccggctgacaaaaatggctatcgtttcagccagaagagtggaaaagatgatttccgttgttctttccgtgtaggcgaaatgtatctgaactcagcagaagcagcagcacaatcggacaaactgccccaggcacgtacccgactgctggagctaatgcagaaacgctataccccagaagcttatgcagctaaagtaactgcggtcaacgcaatgaataaagaaaccttgatacaagagattctgaatgagcgtacccgtgaacttgctttcgaaggtcatcgttggttcgacttacgccgtactacccgcccacgcatcgagaaagttctcaaaggaggaacctatgtgttggaacaggatgaccaacgctatacgattcagattccgagagaagcgattgcggcgaatccggagttgtctaattagccaatcagccattcataaaatataaaacctcctttctcaatccccatgacaagattagaaaggaggttttttctaagatacacacaatttactccacaggagtaattttcacaaaagaaactccgtgatagggaacctgtgtccggaactccccattgtattcccctaaatctttttgccgccacagatcgcgaacagacactttgcctgtaattcccagttgcttgagagctaattcaaaatcatacgtcttcatctggatagtttcagcctcatcctgatcccacaggataaaataaggatctatctggaagaatcctactgcatacgagccatcatacagtttcttgtaccatatctgcccattgtcagtcagcaattttgtggccggtgctgccaacgggtcctgattcacagcaatcacttcattatttgtcagtaaactcaatgtgaaatcatctatatcggacatatcacaaccgatcaataacggagcggagagaatgcaccatagagagatatgagaatattgttcatcaggagtcagagccgattcatgaaccttctctctccaagccttacccagttttcctaccaccagcatatcgggatcattatagttccccggtgcagtagcctgagcacaaacatcctgaaaacaaccaatggctgtcacaacattccattcatcggtaatgtcacgggtggtgcgccacagttcacctcctgcttcccttgcccagttccagacattgggagcaccatatcccacacaatagacaatatcccgatccactttatccaatgcatcacgcataacaatatagggttcccggattgttttctcttcagaatccttctgaaccgcatgatagccgcaatgatcatatttgagataatctactccccatctgccccaagtccgtgcatctatttcctcatgctgataactgcccagataatcaccacatgttgtcggtcccggtgaagaataaataccgaatttcaatcccaaggaatgaatataatcagccaggcctttaaaatcagggaatttctcattagagagcagctctccctgcttggtgcgttcggcagcttcccagccgtcatcaatgttcacatacgtccatccgtatgcatgcaacttttcattcatcatgcgggcagcctcgcgcactttctcatcatctacagaaagtccccagcaattccaactgttccatcccatcggaggagtcagagcaatccggtctcctattttcaaggtaatctctttttcggctacacctttttcgttcatggctttcagaagcactttgaaatctcctctaagttcggtctttcccgtaataaagccggtggaagtatctaatttcagtccggcagggagtcctgacgcttcaaaagtcattggccggttaccacttgccataatcgtcatcaggaacggatttcccggacgggcaccatataccagaggattattaatccgtggagtttccggagcttccggtgtcagaatgtacttctccttagctacaggcttcggccaggcaggtatcgggataatctctccacgagtcacaaacttcacattcaaccagtcggcatggtcgtacataatgccatcgccacattcttccaccaatagcaacactttatcaataccggagaggttgacattgaactcttttacgggatcgcccttctgcatcacaccgcttttccaaagttcttttttatctccgattatcttgaactgcaatttaccggcgtacaagttgttatcatcggctccaaccaagccactcactgaaacggctttaccacccaaatcatacagcatacggctgatggaatgagctccgatcccccgttcatacacaacaccatttaccgtaagcggagtccataccacagactgatttatctgcggtattccccaatcctgcacaaaacaggaatccttataaacttcatccaaccagagttcacgcttcggcccgttattacaagaggaaacaaaccacaagtttgccaaaagagccaatgcgataattacttttgtcccaaatttcatagtactttgctttttatttcaggaccggattaataaacaactcatctatatatacctgttgtggagcttcaaaagccacctttacatagcgtacattttcatccagttggtcaaacaatatgctttcaatccaggcatcatgcttgttgttcgggaaataaggggcgtcttttatggaagacagattatactctttaccgtctattgaagtatacagatatgtcttcatcggcatacctatcttttccggattataattcagcatacgcaacatagctttctgaacacgggttttcttttgcagatccactacaaattcatgatagccggcctcaaacttcacccagcgggcatccttactgtcctcttcagcaaccttaccatccagtaacggttgcaaaccggcctttccaagcatcatttccggagtcgccccattgactaatttctccataaaagccgcttccatcagtttccaatattcctttccgttcttccagtccatatagtcagtatacactttgttcgaccagacaggttgccccagttggtactttgactcaggatcctcaatgataccgtagaacataaatgaaatgatcttatcaacccccgccgcagatgctgcaacctgctgggacagcagccgcggataggcagccggaatcaaggcagaagtacggtcattggtaccctcttcccaagtgaaagtctcacaatttgcccacatttcaatattcaggcggttatgaatatcacgcaatctctgccagttcttcttcagacggggaagtgtgaactgatcgcgtacacaccccacttcatcctgataggcaatgatatccacttttagtttttgcatttgcttctcatattccggattatcaaattctgacaatccgattccatatggcgaaatcaaagtcttcttacccggagtcagttttttagccttctctgataaagtatttaccgactgcaccgcatgctccgcaaaaataggacacaggcaatcttctaccggtaaataccagccataaaaggccttgtggtttttataaagggatgccaactcttccataatctggagttgccgttccttaattgccggatcaagcagattatcatcctgatcctttgcccaaccactactcatgaaaatcttcatattatgtttggccgcttcatccagaatagcatccacaggacttttcttatccttattataccaccaaggcattatttgcgaaggataataagatttcccttcattggcaacctccatgaataccagatactcgatacccatagccgacaattcacgtacttttgcttcccacaatttcgggtccatattatcaaagctctgaggattcgtatatttattacgtacatccttgtatgccaggttgatccagctacctgtaacaggtttcacacccaaagccgactcggtggttttctcttttttctgcttgccggaagcggcattatccgcacccaccgtaactaccggcagcgtaaccaataaaactgacagagcaaatcctatcatttgaaatttcttcttcatagtacacatatataaatctataattaagtgatcaacttcctccagacactataatcagtaccaaaccggagataaaaagaataagcatcagcgtaagcaacagattggtagactttgatgcccccttaaactctttccagatgaagaggccccataaggcggctaccatcgttgccccttgccccagtgcataggaaatagccgcaccggcttttccggcagcgatatagctgcaagcagttcccaatgcccagattataccgcccaacacacccaccagatgcgtattgaagtttcctttgaaatactggctgtaggacacaggttctcccataaaaggtttcttcatcaccagtgtattgaacagaaaattactgataaagatacctattgcaaacacgaacaaagcagaataaggagtcatcatgcctgctgtgggtgcttccagattttccaagtccatagctgccgccacaaaacggtaaaagaatgccatcaggataccggcgcatacagcaaccaggatacctttcttactggtgctctgaccggatgccttggaaacttttccggatgctattccattaaagataatagccagcacaatcaggaaaacgcccaggaaaagaatgacgggatctcccttcggaacactgaaataattgacaaatacacccagcaccaatgccagccccacccctacaggaaaagcaaccgacatccctgccaatgacatagaagccgatagcagaatattagaagcattgaatatcacaccacccaggaaagcgctccagaagttctccggactcacttgcaacaagtcctgtataaatcctcgcccggcctctcccgtgctgcctaaagtcaatccccagatcagagagaaaagaacgatgccaatcacgtaatcccaatagaacaactcgtagcgccaggtctttgccgccaacttctgagtatttccccacgatccccagcaaagcatcgtaacccaacacaacgccactgccaatccgtaactttcaactataaacataatcggtatttttagaggttaatttattcattcaggttcagttctttacgatgaggaatagaagactgcgctcccattcttgtcacggcaacagatgaagctttagaagccattacagcagcttgcctcaagttcatgccttctgccagtcccacacataaagcaccattgaaagtatcaccggcagccgttgtatcaacaggttccactttaaaagcatccacacaatatgaagtatcgccttctctcaccaagcatcccttcgaacccaaggttacaattatattctgtactcccatcgcactgatttcttttgcaacccgttccgcatcagcatcattcacaatctttataccggtaagcatttcggcttcaatccggttgggagtaatcataaacaggtgtctgagtaactctttcggaaggctccgggcaggggccggattcaagactaccttcacccctttttcaaaagctctcctggcagcatattccaccgtttgaatcggaatttccagttgcatcaacaagatgtctccttcgcacatttcctccacaactttatccacatcctgctcgttcagcaacatattggctccggaagctaccactatactattctccgcatgatcgtccacactgatcaaagcaactccggaagcagagttttcatcaagagtgatatattttgtatctattccctctttcttgaaataatccactgactgctgtcccagtatatcattccccaacttcgctacaaagatcagattaccacccagccttttcactgcaactgcctgattggctcctttaccgccctggttcataaagaattcaccacccagaatggtttcaccgggagccggcagatgagaggtcctcaccaccatatctatattggaactgccaattactataattttcttcatggtactatattttaaataaataaatgcatgtatgtgtcaccgtgacaggatatttcttctaaaaacttattcataataaagtatttcccgtttactgattgagcataccacgagtttctttcagtttcaccgggtgaaactgagagtttcatgctttggaaccaggagtttcatcggatgaaactttgcttttaatagggttgcttattttccttcaagatatttcttatacccttcataggtatctgttcccggtttgaaggtagcccaactgaaattcgtaatatgatcggtaaacattccggctactctcagctgttcctccagctcggtccagggtttggtccgcatggtaattctcgggcaccagcactctttgaacgactctatatctactccgaaaatcactccgttagcatcgcaggctttctttatttcggcaaaccagttgggcaggtctacatcaaaatctaccagacaacgtccgcctatatcctgaagataaagcacatctatatcgggagtctgggcaaatatcttaccaaaccattttccgcagaggtcagcgggcattcccctccacaaagcaggagctatgcagacttctttcggagacttcgacttcacataagccgccactgtctgcaaataattagccagcatagacaaggcaggttcctgctgccagcctaccggatacgaaccatcatgaaattcttcggttatgtaccatcccgccagactgggatgattcccccaaagggcaaacagttcatcgaatacttgtttattacgctccaccagaaattcatattgttccggttttgtggtatcttccttgctgtaatcaccggggtatagtccgacaatcagcttcatcccgttacgctcggcagcatcgaacattcggttcatgatatcatattgcttggtcacccacggcagatttgtcggcgaatagaaagaagatttttcattcgtgcggtcattgaaaccttcggcatactggataatccaagtgtcaatgcccacttcacggcttgctttgaattcttcatcccagttggtctctttatagacgccattcagctgaatgaaaacactggagaacttgggagttcccttgaattcaggagtataagaggtcagttgctccagattgtcgatgcaaaactcacctgtacacatgctgttatcatcgttcgtgatttcaagacgataaccttcaaggcggttcagaaccagtttgttttcgcccagatcacgccctttggcaaaagtaaaagcctcataaggcatcactacacgtgtccattcttccttggtcagtacatccttatccacatactcgaagaactgccagcgatctttctcatgaagcgcatcctgcgtaaactgatccacatcctgaataagcatgaaacggaatgtacctttattattcttattacctttcacccagatggaaagtcccaacggatggaaagacaagtcactgcgatagtctcccccactctgctggatatatacggattcggttccggacgcattgccggagaaagagtatttaagctcgaagcttcccgttccctccacacagtcatcgctgataaaacggtctatcgaggtttgcggtgactcgggaagtcctttcatttcgtacaccacacagctcatctcgtcgtaagcattcaaagtctttaccgcacgtgctttcgctactatctcctctgctgtgggggcctgcttactaccgcaagccgccaacacaagcagcagagaagaaatactgattagggatagtatatttttcatatttatttcgttgtatagattattacttcggttatccatattttcccgttcgatacgggatttttccatttaaaagttacagtgtgtttccctacaggacggtcatagcagaagaacaattcacacttccggtgattgatatattggggcaaggcggttgtttcatagaactgtccatcgatatatacatccatctccgccgtatagtccgtcggaagtccacctgccacatatccttttacaaccaatccggttccttcgaaagagaagggatttacatcatctatggatttctctattgtaagtttatcgctcactttcagattctcaaaagctacttccaaagcaacaggtctgatgttctcccgtctgattatgaagtctgttcctaccttcccgtttccatgtttctgcaacatctcgctggcatgtctgtacgtcatgtcataggctttattcagactgatatccgtattggagaaaggtatgtcttctacttcatacaaagcttctttccaggattcggggatgttgctgtatcctatcatggttcccaggatacctgcggctgaagccggattacaatcagagtcctgaccggcacgcgtggcgatatctatggtctttgtgaaatccccctgtccgtaaagcaagcccaggagtatataggcaccgtttatcttcgtaccgatattaaaggaattatgaatgccttcgggacagctgatttcttcgctccacttgttctgcaactcgaaccaggttcgtttccagtctttcggatatttcctgtgccagcgaattacgtccgacatacacttgtggaaatcgctttcttccggtatcaccttcagcgcttcttttacgatatattctatatcattgctgacataagccagagagtacatggctgccacataaactccgccataccatccttcaccataggacatgatatgccccaccctatcgcagatttcagcggcctgattaggcattcccggtgacataatcccggcaaaatccgcttcaatctggaagtcgatgcaatgtgcatgagggttattcttccagtaaccgctctggggtgctttcactccttgcaacagattgtagcgggctacctggttggcatgccacaacggatattctgtccgtccgaaagccgtcgcaaaagaatcaaccggagcatccagcccgcatctttcgaaaacttccacaaaagtcagatccacataaacatcatcatacaaaccgggaaaggtatcataccaattcttgaccgtatgcttatcccagggaatgggaatataatcctgaatgatagttcccaggaatttaaactcagtaggtcccccgtaactgcatcccaaggtctgacccgcccaggcacctttcactttatcacgcaggctctgctcggacagaaccacttctttctttcctttatgaacggcggcagccagatcggctataaagaagaaagccatcaggagccatattatatttcttttcgacatactcatttcttgttttttttcaggtttactcaatcactttatccgtcagatcccagcccataatcgtagagatataaggaattatccacatcgccattttcttatgtcccgaatatccgggatgccatgcagcccccaggtcggtagtccggttatagagattcttatccagtttcagtagaaagattttcggatcattcacttcgtttattatcgcttcataataactgaatacaggggcctgcatagctacagggtaaatgcacaatatgggaatatctccataatgctcacgcagttgtgcaagaatctgtttgtacgctttggtgaattcgcttttgtaaggatgaggctccgttgagaaatcattggaacctaaattgataactaccagatccggacgatattccttaaaattccatttatgggtgaggtcttcgtcaaaggtattcaacatccggtctttcatcgtaaccttcgacacgcgtaccgaatcaccataattgcgagcggctcctctaccggaatgggcaatcagtgtatagtccgcatcataataacgggctaccatagaggcaaatgtgagattacaattttccgtctctaccaggaaaggttcatcgcgatgtttcccgtctgtgccatatccgcaggtgagtgagtttccgataaactcgatatgccgtgttcgcactgccggctcttccgccaggcgtcccgaaccggacaagacaaactgatggacagttgtcttgccgaattcgccttcggaacgtttctgtatcttcaaactatgaatgcgcttgtctatgcccgataccagatgaatcaatgtatccgttccgcatactttcacgactttatgcagtttgccatcaacaaatacattataatagctcgttcctgtttcagaaactttcactgacagctttccaccagtaaagcgggtttccagataagtgcctacccagtcgaaagctaccgaaccatcgggggaaaccaacgttctgccggtatatcgcacggcaggatcattccctttgtaaatagttccatttttttgagctttcagttccgcagagcaacttatccctatcaggataaacagatatagacaataacgtttcatcattttctttatttacgtttcttatttttagctttcaattctttcaggtatttcatgtatccgttgaacaagtcgatagtgcgtgcttcgcccacacggatagacatcttcggatcattgaatacccccgggaactgatagcaaagaatcttctcgaagttatcaaacagattcaagtcacggatgatttcttctaccggacggggatagagggagttatccggattgaacaggaatacttccaagtcgaaccacaaatgagctttagcctcatcacaaactttctgcaacatattagccgcttccttaccagtcagatcaccgtccggcatacgggcaaatccgaatgggcacaagatatccagatgctccataagtgccggatatgtatccattccgttgggaacttcaaaactgttggtagccagcattatcggtttgtccggtgcaagtgcgttacagtaagccttaaactctttgaagaaattcacgatatcgtcttttctctttttacgcatctcggggcgttgttcccagttatccaggccgccgccactctcttcggatacatagaaggcataaaaggattcgtgatgaccatacatatcccacagttctttagccacccgtttgtgccattccaaagattcgggggtaaagtcgaaccaggcaaacatacccactcccatcagtacgttcatgccctgtttatcggcttccgtcaggatggcttcaatcgggtctttggctgtaagttccatacggccgggatacagtttggaaggatagaaggctttacctacatagttatccacattggtagtatgtttgcctacatattcttcattgcggaaaacttcctgaatgaccaccatattcatttccagcttattcatggaacggatcaactctctccattgatcgtcggtcatcttcttgatatcctgattccaatgttttccttcgatttcgctccagtgatagatgcccgtccaggcaccggatatctgttggatagagcgaatatccgattcaatcacttctatatcttttgtcttccgataggccttgccttcattagccactttgaagatcactttattcttccccacccggtccttggtaggtataaccaccttaaccgtttcggcctttccggcagggattgtcacaaccgtttcgtataacagtgcatctttattctctttattccaatacaaagctacctgataagtctgttgtgaagcactttcgttcacaatgccaccgcggatatccagatcgaccttattagtgatttttcccggaggtattaaagttaagctcactctattctccgcctgcaaacttaccagactgaacaaagaaaaaagaagtaaaaaagtacgtttcataatcatctttttaaattagaattagttaaaactacccggataagaaatccgtgattcaatctcgccaccagccagacgaatataggaatcgaacttacgctctccctcttgcaatatgattacacgggcaccgttagccaaattattgtataccgtatttccaccagaataacgcccataggccaataacacctccttatacataactgcataatcattgttatgatcgtgaccgacaaatgtccccataacatctccacactccttgatagaagtaaacagacctgaattagtggtagggcaagcaactccttcacctctcactccaaacaatctgttcttatcttccatcacagcatctttgtattcgggtatgggaatgtggaagaaagccaatgcaggaagagggatatcattattctgcttcgtaaactccttgctttgatttctgtaccaggcaatctggtcaaacttaatccagtcatatccgggtactgactttatctgcgtgtatgcatgagaatcaatgcaatatagaagagccgcatttttatttttatcctttgacgacttcaccgtcaaaacataatcaggagcaacttcgccctcacgggcaggcatcatactgcctttcttttgcgagagataatcatacagttccgcccgggtgcgatcatactcatcatcatgattgccaaatatcactccaaacggaatattgcgtctgatgcaaggctccaaaacaatgtccagccccttaaaagcttcattagaaacaaccacatctcccgtaaacatgacgaaatcaggacgttcggcatccaatacttcgtttatacgatctagagatatttgtgaattcgcctgatcatcatatttataatgaacatccgtaaactgtacaatcttaaacttaccgtcacgattgaacttcaatacttctttctggcccaaaaccgtaagagcattgaataataccattaagcataaagcaattttcttacacatcatatcttttattttaaactgtctataatcttcaataataattcaggttcatctgtagtaatatagtctactcccaacaaataatattgttgtagctcttccgcattattcaccgtccagacattggtaagcaaaccggcttccctggctttttgggtcagattcttatcctgcctgtatgcatagtaagaataatcaattcctgagatgcggtcgttcaccaagtctttcagttccttcttaccttcccataagtaaagagttctggctgtagggtccagttcgcggatacgtttcaagacttcataattgaaactaatatattccacatatccctgcattttcatgcgatgaacaatattcaccactgagtctgtcaactgcaacgtacgttccaagcctttttgggaatcttttatttcaataataggatgggtactattctgtgcccttgcagctatcaagagttcctgaagtgaaggtaccgggtctttctcattaatcgtttgttgaaataactgcaatgaggtgatattttcaacttccaatccatatacatgcggatcatgagaaagaacaactctattgtcggcagttaaccaaacgtccaattcagacccctgacatcccaattctaccgcattctgaaaagaacgaacagaattttgcaacacccctttttgtctccaggcaccccgatgagccaccactctgttcttactgaagccgtctttcaataattcaaactcacactgctgcccatcaatcaaaagtgttatgccgtatctgtaactcgtctgccctgctgataatgccctattctttttcagacagattgatttctctttaagatcaatccggaaaagagaagaagtatcactcaacaaacgaacattggagggcgtgggatatatccggcccaccacactccccgactgtcccacgggaatcagataattatccagcacatacttcgaaatatctccggcccttatgacgaaggagctaagaagcattcctgctataaagattgcatttttcattctattttagtctacaataaatatatacataaataaaaaccatattagatatccggataaagattgcgaacaacacccctgtccatatatagttgtggcgatgatttaagcgggctacacccttttaatgaagaggctacacccttttgtccggatagctacaccctttcacccttatggtgtagcccttttctatttaccactacaccttcgggtattagaatctcctttatttacaaaagtccgttatcttccagatactttttataacttgtgtaattgtttgtacccttcttaaaagtaacccaactgaaattcgtgatatattcggtaaacaaccctgctacgaatagttgctcctttagttcactccagttcttttcccgataagggacattcggacaccagcaactctggaatgattctatatcaacaccaaaatgtacgccgttggcatcacatgcttttttaatctcagcaaaccaattaggcaggtctacatccacgtccaccaggcaacgtccgccaagatcctgaatgtataaataatcaatattgggcgtctgggcgaaaatccgtccgaaccattggccacaaagatcagctggcatacctcgccataaagccggagcaatagaaacgggcttatccgattttgtcttgatataagaggccactccttccagatatttagccaacatggataaagagggttcttgctgccagcctacaggataagaaccgtcgtgaaattcttcggttatataccagccttcaaggcaagggtgattgccaaattgctcatacagctcatcgaacaccatcttatttctctctaaattgagattatatttctccggtgatgccgtattcgttttactgtaatcaccgggataaaggcctacaatcagttttatgccattgcgctcggcagcctcgaacatttggtcgataaagtcatacttctcggtaatccaaggcatgttggtattcttatagaacgaaatgctggtgttttctccgtctgtaaactgctccgcgtactggataatccaggtgtcaatgccgatggcacggctatcctgaaactgtttatcccagtcttcgttgacataagcggtattcaattgtacaaaaatactggagaacttgggctttccgcttttcagttcataagaggtcaattgctccaacgcgtcgatacttacctcgccggtgcagacttcatgtttcgtatttacgatttcaatcctgaatccttcaaaacggtttagcaataagccgtcagccgtagccccctgcccctttttatacaatttgaacgcactgtagggcataaccagacggttccaaccttctttggataatatttcttcgtcttcgaaagcataatattgccatctcttacgtgtactgtcatgcggtttgtcggcgctgaattgcttctcatcctccataatgatgaagcggaaaacacctttgttacctttttgacctttcacccaaatggaaagtcccaaaggatagaaagacaggtcggggcgataatctccccatgtttcttcgaaatagacatactcaggatttgaagtcataggcttaccggaaaaactgtatttcagcttaaaacttcccactccttctttatagtcatcacctaaatcatagtcaatagtggcattggtaggttcttcggcactggtaggaccagtacgataaatttcgcaccccaattcatcgaaagggttaatatttttagtagctttcgtgctattcaatattttgcgtatctcttcttgcaggttatagtcaccatcctgaccgtttcctcctccgttatgatcatcacttccacaggaagccaaaataaaacagaacagacttaccaatatagcagttgttttcataaggcattagttttaaaagagagtgccgccggattagcggcactcccgatttgaattaatcaatgtgtattattgacggaaataactcatcttatacattcttacaatagactgtgataaatcaaagccaacaacagaggttgcaatgtacacatcatatccggttgaggttgcttctttgtagacagcaacgtctccccagctaaagtaattctgcccccatgcggacatatcgcttgtaaatacacagaagtcgccatatccgtcatcgtccggtcccagttccatcttagaggtattggtaatgtcgaataccttgagggtagcaccaccaccggcccattggtcagcaccttggtcattgagtgccaaataggtatcattttccaccttaaatacattgaagccaagcaagcggtattcatgagcagccgcattcaaagctgtaacttccatggatgtcgtaaagatattgaagcgactcttcaaagcctcatcactgtttccgtttacccacttcgtataactgatgtaatgatccgaatcgtcggccaatgaagcacgctgtatggcaggtgcggcagtccaagaacttccggccggtccgtaacgcaatttattaggctgattggcaggagttactaactgaccatcctgtaatttccaataataaatagtcatatcattaggacctgtaccataaatataagctgtaccgctggttacatcacctgccacgctcatgttatatcccaaatctcccggacaaccatcaccggcagtatagtcaagcagcaacttatgttcctgatctgcttcagaataatagaagaccatgaaacctgcaccgtaaatattttcacgggaagtaatcaagtgaccggcatcatccgtacgagccttcatcataaacgatcttgctgcatctatagtcttaaccgctgctcccgtcttcatgtcatacaggtagataggaccattatattcctgaactgccagatattgaccgtatattgctaagcctgtattattgcggcttgccaatcccagatcggtacagttcttttcccacactttggagaacttggttttaggcggtgtcggtaccacacgaatcgtattgttatgacgatttcccaatgcatcgattactgttattttataaggctcagtgaaatccatttcacccccaactcccggaacaacataacaattatgctccacacttacggtgcaaatcagacggcttacatcgagcgggtcttcatccgtggtaggaactttcaccgtaatttcttctccctcttcataaggacctttcttggtagcataaaactccgtcggattatcaggtatctgaatggttacattaagtagaccattcacttggctttcatgtgctgtgctcaagtcaggagactcacaggaaaccaagagcactgccccaaacaaacacgctgttgctgcaattctattaagtattttcatagcttcatttttttaattatttccattcgtcaaactgttcacaagcagggttctgctgaatttctgcaataggaatagggaagcgattgtatttctccagataaacacgcgttttaccagcatcacaatccacaacattgtattcatatccatcacctacttttgtcggcttcactccttccatgtgagtaccattcaggactgtagttgccagtccccaacgacggagatcccaaaagcgatgtccttcaaaagctaactctaccattctttcgtggcggagaagtttcatgaattcagtttttgtactggctgatactgccggcaaatcaactctgtctcttacttcattcaatgcttccaatgcttcagtaagtttatcttgcattgccattgcttccgcatagatcaatagaacttcagcataacgcatataatagaaagtcaggtcagttctacgcatttggctcttactaatttccggatcaaacaacttacgcatatagtaacctgtgcaagtagtaccaccacctaaaccatagccatccacactaccttcgtatgtgtaaagtgtttctcctttccattgacaaccattataaagtatggaagcatagaaacgtggttcacggccttcatagggattggcagccatttcaggattgttccaatcaaactctttaccatcagccatctgataagccgataccaacgtctctgtcggactgatttcagcataaccaccatcactgggcggacaattgaaataatcaaaagaataatccaacgtctcgtaaacatagccaaactctatgacactttcattatttgcaaccggtttcgctcttctattcagaaacaactttccataatcctcatacagttcatacccttgctttttcaattcggcagcagcatcggaagcatctttccaacgctcagcatagagcatagcacgagctttcattccataagctgcaccacttgtcaacttaccggcctctacagtacctctcagaggcaaatttttagctgcaaagtctaaatcctctgctatgaaatcccaacattcatccggtgtacaacgcgcatgctccttttgtccaagttcaggtaactgcttgtacaggataaaactagctccataccgcttcgccaaatcaaaattagccactgcacggaaaaaacggaattccgcctctgcacgtttggcaacctcttcagtaaagttttcacggtgtttttccaatccttccaaagcacggcaacaagtcaattgccaggaatgcctattattccagttgtcaaaaagattactggcagaagtaataggagtagaaccgaatacaaacaaattagtattggcagccggattattggctttcaaaagatcagcgcatgcatcatcagtgattgaataatatcctccgatcaaagaataaaagccattaatatacaattgcagattcgtttcattcgaccaagtgatatcgtcaggataactacttgtcagaacaggatcaatatcacaactactcagcgtgaagcaagcagaagcaaatactgttattatcttatttactgatttcattgtattagttttttagaaagttacatttaatccaaattcatacgtacgctgttgaggatagtatccctgatttacacttggcatttcaggatccatatgctccagatgagataaagtaaacaggttaccaccggctacataagcacgaattctttcaaagccagcctttttactccatttctttggtatggtgtatcccaactgaatagatttcagacgtacataagaaccatcttctacccaccaggaagagaattttccaccatttgatcttgactcgattcctaaacgaggatatttagcatcagtatgatcgggacgccaagcaccttccaccaaataataaggagtatttccatcagcatagaaaggacgtgtatagaatgtatcatcacgaattccactactatacaatccgcataaatttacatcaaacagagctgcaccttgcaacaacatattgaaatcaaaacctttccattcagcacccagattcaaaccaaacatcatttccggtgtattgctacgaccaattggaaccatatcctgatcccaggtaatcttaccatcaccattaatatctttcagtttgatatcaccgggtaatgtcggaccgaaaacagcactatgagctatttcttcttccgactggaataaaccatctgcaacaaatccccagtatcttcccatcgggccaccagtagcacgtttataatcaggcacattggcatcttccgtcattttcaacactttgttacgagcccaggagagattacctcttacatgataagtaaaatctcttatatgattattatgagacaatacgagctcaaaaccacggttatcatgagaaccataattgatatacgttggatagtaagatcccagcgatggcgggaagtttgccgactgagactccaatgaacgggtggtcttcatatagaacacatccaattcaacacccaataaaccattccacatactagattcgataccaacattataagtatcagtcaactgccacttcaaaaaaggatttaccgggctgctcaatcccaaatatttctggggactggtaccgaataatactgtcgggtcagccgataaagtggctgtagagaaataagtcatcgtattactaatggcacgatcgctacctaaacgtcctacagatgcacggatcttcaagttttccataaaaggaacggcttccttaaagaaatcttcctgagaaagtctccatcctactgaaacacccgggaatacaccccatctgtactttttgggaagtgctgtagaagcatcaattctgctggtgaactctaataaatacttatcatcataagaatagttcagacgaattacatagccggcacgtttagcctgactgtgtccgccttttaccaaatctttattcacctcaagaccatagttcaaatccatgatatcagttataggaaaatccgttctaccggcagacatactggactcgtctgttctggaaaattcatataagaataatccggatatagcatgcttaccaaatttatttgagtactcaagagccggttgaatcgtataaccttcactttccgtgaaccactgattcaaagaaactttattagcaattcggccagtctctacattaccttgacgggtagtctgattccaaccgtacacatcataagtcaagaagtacttcttctgcatagtataattcttcagataagaagcattcaacttaacagacagtcctttcacaaaaggcagctgatacttcatagcaatattgccttggaaatatgtcttcttaacattattgttaccagacaaatctcttgccgcaataggattgttatttccattaccagccgtatttatactggctataggcattccatcagccgtataaggcttcaagtaaggatatgacaacaatgcttgctggaaaatagaagcatacgaacctacacctgcagaagcacctggctcatcctgctcggaaacataaccggataaatcaagagacaaatcaaagttatcagtaatctttgcatccatattagagcggaaattatacttatcataagaagtacgtttaataataccctcctgattgtatgcaccgactgaagcaaagaacttaattttttccgtaccaccggaaactgaaacattatttgtataagtaggagctgtattacggaataacaaatcaaaccagtctgtatttccataaatgtgctcattctctcccggattagtaatacggtctatttcttcaggtgagaatctcaagttttcctctgcaactccgtccaagagttgagccttattataccaataagcataatccggtccattcaggaacttcggaaaatcagtattctgactcaatgtaagtgatccgttatacgttacggtaggcttctgaacagcaccacgcttcgtcgtaatcaagattacaccagcagcagcgcgcacaccataaacagccgcagcagtcgcatctttcaaaatagtgatagattctacttcatcaggagaaaatgatggaaagtaatcggtaataacaccatcgattacaatcaacgggctaccatctccggcaccattaccacggatgtacaagttagcaccatcggcacctggctgtccactgctctgtttggaaatcaaaccgggcaaacgaccggccagcataccggaaaggcttccgctcggtgccatctttagttccttgttatccacttgtgcaatagcaccagtcacatttattttcttctgtgtaccgtagcctactactacaacttcatccaacaaattagcatcttccctcagaatgatcttcagaagtttttttcctttcaactgcactttctgagtgatgtagcccacataagagaaagtcaaatgcgaattcgcattagataccataagtgaaaaatgaccatttaaatcagtaatagcaccatttgtccctccctcggcaacaactgatacaccaatcaacggagtgtcattctcatcaaacacattaccctctacctttatctgagcatgtgcactcatacttactagagagaataataaaaatagcaaacaaagatacttgtttttcatattaccaaaatttaaaattaggaattgttattctcgtttcatacgaccttagttatatcttctaaaatttgccagcactggtaaagtcctctgggaacatggaaacaacctttccactttccacctttcagaggcaataacacctcacctcttctattcagataaccataccattccggatattcattatctttgaaatggctccatgtatattcatgtaccttttcaaaccaatcaagacattgcttatctccggtcagttgataacctttgagcaatgaaatcagagtttcaatatgaacccaccacaatttctgatcccattccaattgttggggtggacatcctttacgatccatgaaatagtagataccgccaaattctttgtcccaaccataatcaagcatcgtcaaagtaatgttcttcgccttttcaatcaaatccggacggttcagacgtttcccaagatccataatgaaccacatggcctcaatatcatggcccggagtaacctgacgtccttcgaaagaatcggaaagttctccatttgccagaacattctctacaataatgcctccaagttccggacgataaaagacttccataacttcatggatacatacttccatcgtcttttccagacaacccttatccagcaaatgctctatttccatagccaaattacataggatcatcggtaaggcaaaattcttcaaatcacgtgtgcccggataaagcttattccattttcccttaggattgttggtcttcgataatacaatatcgaaagtcttcattgctatatccgcatactcctggtttcccgtagccaggctaagttgtccaaatgccattacagcaaaagtgtatgagaagatattataaggctccaccaagggacgtcctgtacgatcaagagaaaaataccagttataatttccatcatgaccatattttttcaggaactcacctccctgaatagcacagtccaaccactcctggcgtttctctaccttattataaagcattgaaaacaaccatacttcccggccctgtaaccaaataaatttgtctgtgtcaaaaacattccctttccggtccaaacaggtaaaatacccaccatgctcgtgatcctgggagtgctctaaccagaaaggaagaacattatccaacagttcatccttatactgatccgctaatttcttcaaatccataattctattatttttttagatgagaaactggaaacgttttttatccggcatgcatataaaccagtttctcaatatattgatacctatttatctgttgtataagtaattacatctcttacccaaatatctgctcctttcactggattagtccatttacaagtcactttatattttccgtaaggctgttcgtaattaaaaaacagctcatgtttgcgatggttatacttcaacggtaacttgcagacttctaccaatttatcattgaaatatacttctaactctgcaacataatcttcaggaacattatcacccttgagttctcctttaataacagcccctataccgtcgaactccacagtcggaaagttagcaatccaattatccacagtcaccttcttatcaagtttcaaaccttcaaagctgatttccaatttagcaggaacaggcttctgaaagttaattttaacttcattctcacccacttttccaccttctctttctatcatctgcaaagcctgtccgtaactcaactcagaacctttattaaagctcactgtattattgaaaggcatatcttcaacaattgccatttcggccttatatttctccggaaggcgattatagccaagcatggttcctaaaatgcctccggaagaagccggattacagtcggaatcttgtcccgcacgtgtagaaatatcaattgttttttcaaagtcgccctgaccgtaaagcaatcccaaaatgatataggctccgtttacataggtttcaatattaaaaggtacttcaacaccatctgggcaggctatgtcattagttccccattttttctcaatctcttcccagcactttttccaatcatctggatattgtttgtgccagtttataacatcggtcatgcatgcataaaaacgactttgctgggggatcgctttcaaaccttccgtcacgatatattcaatatcatcacttacataagccaaagaatacatggcagctacgtatactccgccataccatccatcaccgtaagccatgatatgtccgatacggtcacaaaaatccactgcactattcaccatacccggcgacataatacctgcaaagtcagcttcaatctgaaaatccaagcaattggcatgaggattgtttttccaatatccactggcatggggggacaaaccttgcaacaggttataacgagcctgctggtttgcatgacacaacggatattctttagctaagaatgctgccgcaaaagaatcgacaggagcatccaatccacacctttcaaaagtctctacaaatgtcagatctacgtaaacatcatcataaagaccacctccaccatcaaaccatttcttgatttccccatttccccatggtataaccacagaatcaggaatcatggttgacaaatactgaaactctgttggaccgccataggtacatcccaagatttgtccggcccaagccccttttaccttatcgaataacgtgtctttcgatagggtgaggttcaggttctccttctgagaagtaccgcacgaacacaatgctgctataagacagccactcaataaataatttctaatcttcattatatataatattaaggtcaatttttatttttcatccaatagcgttcaatctcttccaaagactttcctgtggtctcgggaacaagtttccaaacaatcagcatatagggtacacacatgattgcaaacagaatgaatgttccggcgggggtaagattctggagcatccagggggttaactgtccaatcaagtatgtacctatccataaagcaaagccggcaatggacatggcaagcccgcgtacccgggtcggatacatttcagaaagaagcacaaataccacagcacatatagacactgcacaacaaaatacatagaagaggaaaaagattaaaaggaaaatgctggagataccccaggactcaccataaataaagtaagttgcaatcagtactaaagaaatcaccatacctgatacgccataataaaccaactttttacgccctactttatcaataataacaagagccaatacagtagtcaatgtattcaccaatcccactaaaacctgatagaacaaagaatcacctccggataaacctgcattttcaaaaatagaaggtccataatataaaacggcattcacacccataaactgtcccaacacagcaatacatacaccgataataacagctttccttataccaggttgcaacaagagcttccattctgatttagactcggatgatagtacagacttagtctctgtcaattgaaataaagcttccttagaagaggtataaattctctcaagaatatttgtagctttttcttctttccctttcagtatcaaccagcgaggactctcaggtatgaaaaagattataatgaaaaacatgattgcaggcaatgtttccatacctaacatacctctccacacctccgatacaaatactagattccaccatcctgtactaacatccggattactcatagaatagcctaaaagctggtaattaacgagataagctcctaagaaaccgattgtaaccgccaattgatacagagaaaccaaacgtccgcgatattgcgctacagccacttctgaaatataaagtggagaaatgatagaaacaacccctatcccaacaccacctataatccgatagataaccagttgattaaagtctgtagatacggcacaaccaatagccgatgtagagaataaaatagctgaaaggatcatagtagattttcgcccaaacttatcactcaaaataccagcaaaaagcaccccaatgatagaaccgatcaatgcacatcctacataccatccttgttgcaaagcatccaacccgaactgttctgttacctgcgcaatggtaccggaaattacggcagtgtcatatccaaacagaaaaccgcccaaagccgctactaccgaaaggaaaactaaataacctaaattaattgtcgacttcatatttattttatattaaagtattctttatatctatcatacaagtgtcccgcctgtaagtaagctgattgtggactcataaagtgagaaaattcaaaagttatggctttatcatagtcggcccgttttgcagcttccaacttcatccggagtttatcaaactttatcggtaagaagttgattggcatatcacgatcaaatgtttctgcattcgtccaacatttcataccatatttatccgccagctttttattcactgtaaaaaaagcatccaattcatcatagtcaatgtgcccatcctgaaaagcacaagcatcaactacttcgtgaatcccatcaaaaatctcattccactctctttcatgttcctgaactgaaactgcatcttctttagttaacttatcagtccccatcacagccttttttccgtcaatccaaggagaaataaaagtaggaagacctccagagacatccttgcattgttttcccattgccctgaaagcatcaatagcccctttagtcttacggctgatctcgccactgatataccatccgccaaaactcttgtatttttcaccgtattgtttccagacttcatcaataacgtatttattatcttcaatctcccaagataaatcacccgtatcccaatacttcccggaatcatacaaaccgaaataaaatttcatctgatatttttccgccaaacggagatacatatcgaccaagtcgaaagatggcatatagcaccctttaccaagcaaatatttagaaggataagtaataaacttgcgataaccggaacgaatcataataacagtatcaatcccaatacttttcatgtggcgaaaatcctgctcccactctctttcactccaattctgatgaggaatatcatgagaaatttcatctaagaaggttcctgttattttcaatccattattcttaggaataataaatttatcagtttcaccaccgggcgatgaagagaaagatatcacttctttctcttcagttgccagcaatccaggagctactaaggcggaagctcctgccagtgcggcctttttcaaaaaatctctgcgattgcttgttttcatagctttcttctgtataatatatatgttaacctattgaattctaagtttaacctttattatcatagaggttattatatttataacacagtgcaaatatagatatatttattaaataaacaatagataataaattattttattattaaaatctcattataccatacttttaattaaatacagccatattattaattaataataacgaggaaaaagaaaagaaacgcaaactaaagataaaaaaggaataaggaaaaaggagagttcagcaattatcaactaaataaaaagaagaaataatattctttttcacatagaaaggttgatgttaataaaattattaagtatctttgttgacaataatgaaattaacaaagagtatgtatcagcaattcctaaaagaaatagaaatggggtctaaaaatgcccttataaaaaaaaggattatcacctattatatatataatggtagttctacaattcctgatctctctaaggagttagatctgagtatccctactgtcactaaattaataggtgaaatgttcgatgaaggttatataaatgattatgggaaactggaaacgagcggaggacgccacccgcatctatacggcttgaatcctcaatccggttactttattggagtagatataaaaaaattctccatcaatatcggattaatcaatttcaaaggagatatggtagatctcaaaatggacattccttataattttgagaactctttggaaggaatgaacgagctttgtagtcttattctcaatttcatcaagaaactttcaattgacactgaaaagattcttaatatcaatgtcaatgtatcaggtcgggtaaacccagaatccggatatagtttcagccagtttaattttgaagaacgtcctcttgcagatgtattaagtgaaagactaggatatactgtcacaatcgacaatgatacacgagcaatgacctatggagaatacatgcaaggatgcgttaaaggagaaaaagatattattttcgtaaatgtcagctggggattaggaatcggaatcattatagatggaaaaatctacaaaggaaaatcaggattctcaggagaatttgggcatatcagcacatttgataatgaaatcatctgccactgtggaaagaaaggttgtctggaaacagaagcttccggctcagcattacaccgtactctgctggaacgaataaagaaaggagaaaattctattttatccgaacggattaacatggaaaccccattaacattagatgagattatagcagcagtaaacaaggaagatgtgctatgcattgaaattgtcgaagaaatcgggcaaaaattaggtaaacaaattgccggtcttataaatatctttaatcccgagttagtaataatcggaggaacattatctctaaccggagactacattacgcaacctataaaaacagcagtacgaaaatactccttaaacctcgtgaataaagactcagttatcacgacatccaagttaaaagataaggccggcattgtaggtgcatgcatgctggcacgaagccgaatgtttgaaggtgctaattaaacctccaacattcgtttcataaacacagccgcaccttccaagtcggagggtgcaggcgcccatggcgcaatatcttcgggaggaagtggtttataagggccacttttgatttcaaaaatcacagtgcctggctctaaagcaataatactatgccaagtaccggaaggaatctccaccccataaactccagccgacggatttaggttaactttttctattacattacctaaatcatcataaaagaaagtcaacagacttccacgtaatactacataagtctcctctttatcagtgtgacgatgaggaggaagatacgttcccggctctaatgcgttaagcaagcgatgaataggtgagtccaatgattcatgaaaattataattcatacgcaaacgagaactctctcgtgcttcatgggacacactatccaacagttcttctgaaatcaacttcatcattacttcaacaattgggcaaactttcctggaaggtttgccttatcagatactatagtaagctctttaccatcagcattcactaaaaatgccgctttttgagaagctacaacagaggtcatatccttaagatctccctctacaaaaacacaaccggagaaaaaaggaacaataatttcctttgtctttccattccagttcacataaattgtttgcataggacaataagtcttatatccggcaacagtaaggtgttgcatcaatttacgttccaatcttggcgctgtgtacaatacataccagctacgcgaattttcatccatcatcatatcgttgtttgctttttccatccttttaataaatcctttataaacaatatccatccaacactaccaacaccagccaaaaatacgaaacctatcagaatcatgggcttgctaggcttagacggacgcaaaggaaccgtcgctggctgaacaacagtatataccggagtaatttcttgtactttagcttttgccatctgtaactgttgggcaacttgagtatatacattatatgctaaactcatctcattttgcaaacgctcctgctcagcacgataacttaacaaaataatattttgattggcatctacaaaagatgcatacttactttgggcatccgtatagttagcttttgcttctgtatataatttctcggtaaaagccaaatcatgacgagctttattagttcgatattcagttatataattctgaaggcggtgcattactgtatcggttaatgaagcagaaattaaaggatcctgcattgttaccgtcaaggtagtaacacctgtcttcttatcaacagagacagcaatacgtttacttagcgcttcggcaatgtctgcttcatcttttgttaatctaaaaggatccagtgtaccagttccttctacttcatcatccttaaataaagagatggtccaacccaaaactttaaaaggagcagaaataatagcaccccaccaaggagcacgctgatgttcgtccaagtaaacatacagtgtagtatctaccttttctttatcatctttgacctttacatcaaacaactcagtcagaaacggagtagaacttacgatatccggataaagatccggataaagagcatcttctccaacagaagagcccatattgattccagccatagcagccaacgctcccatgctacctcctgaagttttcccagtgctttctggtgctaacgttacgctagtggaatattctctgggaatgctaaatgcaacaaccagtcctattaacgcagcatatccacacgctttaaaaaccaattttcgctctgcccaaactttcttggcaagttcaatcaagtctatttcctgttcctctggttgttgaggaagtgtattcagttttttttcttcacccataatccaaattacttaaaagcgttagccatagttgctaccattgctgcaattgtagcagttgtactactaatacccaaaatttcagccatcgccatatgcttcttttcagccttgctgggaacgataatttcacatcccggttctatagcactggcatttcttgccttcagacgagataccgtaccattcatgtaaaccacataaactttcttcttctttgccatattgccataaccacccgcctgattaatatagaatttcagattctttcccttctgatacactacggtattaggatacatgaccgaaccactgattttcacagtattcacatattccggaatatacagtacatctccctcacgcaaaaccaaatcaaaatcagactttggattggctaaagctttctccagatcaatacctacagtataggtctctgacagatttaatttctgtatagatatggagtcctttccctcaccattctgagccatacggatagcgtcattctgacgacgtctttcctcatcggacaatttacggattaaacgagctccttttacataagcatccggagttacaccaccagccttgctaaccaagtcagacaagcgctcattcttcttcaataaagaatagctaccagagaaaagtacttcaccagcaacaaccacattctgttgcctacgataagcaggacttctacgaatataaacagcatcaaagggctctaaatagaagttctccgcatttcctccaacaataaaaccatcttttatatcaaaagtaaatgttttacctaaaacactactgaatgaagtgctcttaggatctttaatacgacgagttacctcaacccttgttgtagcagcttcttccaacaaaccacctgcctgaacaagtaaatcttcaatagtcatattcttagaaaaaaggaaagtacccggattagcaacttcaccataaattgcaaccgtttcttcttctttcaggtcagtaatacttgggatatacagaatatcatttttctgcaaaggaatatcagcaattgtcccatttaatagtcctcctaaatcaatagcaatgatttcatgagacaggtcttcatgctctctatctataattactctattcaggaaagcatctccacgcaatccttcagctttctttattaattgtttcaccgtatttactgtaccgtctagttgatataaaccggcacgataaacagcaccacgaacttctacacgattttcaaaacgatccagtacagcatctatcgtaatcatatctccatcatccaaacggaaaacagagtaatccatttcatctacattaaagacctgatgttcacgtccactcttacgcacaagacgaatggcttttttataagcatcaccagtaaaaccacctgcataatttaatatggtagcaacagtctctgtaggtttcatctcataaaacatcggtcttttgactttacccacaatctcaaccagagactgataaggatctacaatgatcacgtcaccttcctgaaggcgtatatcatccttcattttacctttcattataaagtcgtaaacatccagatcagcaaaggttttaccatcacgtaccactttaatactacgtaaactaccgatacggtttacaccaccagcacgatataaagcatgaaatacagtggaaaatgcagataaggtataagttcccggtacagaaacctcacccataatattaatttgtatcgtacgaatgtcacccaatgtcaattttatctcagagttgggctcagtacctgaaattccagaatagattttagaaaactcacgttgcaaaaaagagttcgcctcttttacagtcataccactaagatgaacgggacctaaaccacggactaaaatagttccttcgggagaaatcgtctgacgaattgtattttctgaagctccccagatatctataataacttcatcacccgggcctaaacggtaatttaccggagtagccagatttgcactcggctcaaaagaaaggtttctattagaaaataaactatgaccaaaaatattgcttcctggtgcttcaggagtagctttcgcatcacgttttaaatcaattatttctttctgttcttctaattctgcttcttcataagaagtacctctaatagctttcccgtctgtcattaaagaagtacgttcacgaagttgagagggtttgttttctactccatctgcagcagtactatgctcggcatattttttttgtatacgagcaacctgttctttggttactcctctacgcaatagctcagtagtcatttgcttttgcgatttgccagttctctgtgcttctttcacatattgaaccacctgatcatccgacatttgctgggccataacgccccctacaaggatgaagattgaaaagaatagtgctattaatctacgcataagatatttgattaatctttaaaattcctacagttaaatataaatcgggcacaaaggtagcacattatttcagaacgcccatttattttacatcgaaatttcggaaaaagaattaaaaactccattcagccgttcaggcatccgcacaagactcagaaaaatatgagattatttttttcattttgttaattattaccgctgaatcctgcatgcaattattttccgttaaagtattaatctgctcgcaaatcatagtataatcaatgaaatatcctttgcttttccttattttttcatagctggtgggcagtgtatcttctactgcatcatcttcaaacacatagatttcaccattctcacccaaattccccgtttccaatatcaactgacaagcttccgatacagtcattaaactgcgaggggcatcaggatatacatcactgaagcgaactacaaataatttagtaagactattttcctgcactactttgcgagataatccctgtacatacatttcagccaaacatttactataccccatagcatgcaccggacagaaagcatgatctgtagaaattatcatacattttttaactttgtattttacagacaaatccgcaacagtctttgttcctaaaatattcacctgtatagcttcagaagcataatcttcaagcatggcaacgtgtttatatgctgcagcatgaaagactaactgcggcatacactctctgaaaatagcctccatacgagtataatttgtaacatctgctactaatacccgtacttcgagattcttccactggtcagacaattccaattgaatatcgtacaaaggagattcagcctgatcaaccaatatcaactgatatggatttagcgccgccaactggcgaacgatttcctgccctacagtaccagcagcaccggttatcaatattcgatgtccctcaacataagccgctatcttacggatatcaacctgaattggttcacgacgaagccaatcttctatatggatatcttttataattccatcatccaaacaatcgctcaagggaggcactgtcatcacatggatatcctgagctaacatttgtgctactataccagactgttccaaatccaccaatttatcaggtgaagcaataatcgtacgtacattcttcctttttaagtgttcaaataacatcttatcattagcatataccctacatcccatagtgtgtttgcctatcatccacggctcatcagaaataaaaccacacacacgataatgattattcctacttacacgcatagattttgctatattcactccagttccacgaaaaccataaataaacacattcacacaatgccgaatatcaaaagacaaggcttcatgtaacattttcaccaaaatgcgcagacatgccatgaatatgaagttaagaatatatgctataaaaattattccactgggtaatgtttctcccaaaccaaaagctgaccagcaaaaatttcctatccccagtactccatagcttaatgtaagagatataaacactctatagatatccacaaacgaagaaaaacgaataactccaacatatgtatgaaagacagaaaagaaacacagattacaaaacaaagagaaaaaaatcatccatacatacaatgacatcttatatattatagaagacaccccgagttgaaggatgcatgctaaaagcatggaaatcattatcaaacaaatatcaattgccaatatagtccacttggaggcaatacgggatgaaagattcttataatatatcttcaaattcatatttattgtcagattttaggttgacagtaagatttgcaaagatgtattttttatattgataaaacaattattttagaaggaaaaatgacagagcaaatatagaaaaccattttaagaaagattttttcaaaaaaaaacctttttcttttcgtaatttcaaagaaaggtgtaattttgcaccccgtaaatgaaaagtcactgccgctatagctcagttggtagagcaacgcattcgtaacgcgtaggtcgccagttcaagtctggctagcggctcaaaggaaaggagatgcttatgcatctcctttttttatttcatagattcttcttacctttgcctgactaaagaaaactgtagaaaccgatgaaaaagaagacaaaaagaattctcataggaggattgacagccctgttccttattggtgcagcttgtgccggaacattctattattatttattctatccacagtttcatccctccaaaacagcttatatttatatcgacaaagacgatacaccggattccatatataacaaggtaaaaaaacagggacatccgaaaagtttttcaggctttctctggatggctaaatggcgtgactacaattcaaacatccacactggatgctatgccatccgtccagaagagagtgtttaccatgtctttagtcgtttatatagaggatatcaagaacctataaatctgaccattagcaatgtacgtactttagatagacttgctcgcagcgtaggtaaacaacttatgattgattctactgaaattgcagcaataatgaacgactcgctatttcaaaagaaaatgggatatacaaaggaaacaatggccagcctgttcattcccgaaacttatcaagtatattggaatatgagcgtacaggatttctttgaccgtatgaagaaagaacatgagaaattctggaatcaggaacgactagccaaggccacaagcataggcatgaccccggaagaagtatcgacgctcgcctctattgtagaagaagaaacaaataacaatgaagaaaagcccatggttgcaggtctctacataaatcgtttaaataagggtatgcccttacaggccgatcccaccataaaattcgcacttcaagatttcgctctaagaagaattacgaatgagcacctgaatgtaaagtcaccctacaatacttatctaaatgccggattaccaccgggaccgatacgtattccttcaaccatcagcattgatgctgttctgaattatgcaaagcacaattatatttatatgtgtgccaaagaggacttttcaggtacccataactttgcttccaattacactgatcatatgaaaaatgctagaaaatattggaatgctttaaacgaaagaaagattttcaagtaaaatcgtaataaaataaaagcaaaaggctatatttgcgagtgaaaaacgcagattattttcttaattaataatccatgactaacattaaaacaatcagatatgagcaagcaactcttacttggcgatgaagccattgcacaagctgcattagatgccggactctcaggcgtttacgcctatcccggcactccttccacggaaataacagaatacatccaaatggcacccattacggctgagcaaaatattcacagtcgttggtcttctaacgaaaagaccgcaatggaagccgctttgggtatgtcatttgttggtaagcgagcattagtctgtatgaaacatgtaggtatgaatgtagctgccgactgttttatcaattcagccgttaccggtgtaaaaggtggattaatcgtaatagcagcggatgatcccagcatgcactcttcacaaaatgaacaagacagccgtttttacggtgatttctcacttattcccatgtacgaaccaagtaatcagcaagaagcgtacgacatggtttataacggctttgcattctctgaaaaaatcggcgaaccgatattattgcgtatggtcactcgtctcgcccactctcgttcaggtgtagagcaaaaggctcaacaagtccagaatgaaatatctttcagtgaagacccacgccaatttatcctattaccaggtaatgcacgcaaacgttacaaagttttgttggaacgtcaggctgaattcatagaagcctctgaaagttctccatataataagtatatagatggtcctaacaaaaaaatgggtatcatagcttgcggtatcggctacaactatctgatggaaaactatcctgacggctgtgaatatcctgtattaaagattgggcaatacccattgcccaagaaacaacttctacagctggtagaagcctgcgatgagattctggtattggaagatggacaacctttcgttgagaaacagttgaaaggttatctcggcattggcgttaaagtaaaaggacgtctggatggcacattgccacaggacggtgaattaaatccggacaaggtagcgcgcaccgtaggaaaagaaaacaaatcagagtttggagtgccttctcttgtagaaatgcgcccacctgcactttgcgaaggttgtggacatcgtgatatgtatactgtactgacgcaagtactaaaagaagaatatccaactcataaggtattcagtgatatcggttgttatactttaggagccaatgcgccattcaatgccatcaattcatgtgtagacatgggggcatccattacaatggcaaaaggcgcctctgatggcggtcttcaccccgcagtggcagtcatcggagactcaacttttacccattccggcatgacaggacttctagactgtgtcaatgaaaatgctaatgttaccattgtcatctcagacaatgaaactaccgctatgacaggcggtcaggattccgccggcacaggacgtatcgaagcaatctgcgctggtatcggcgtagctcctgaacacattcgcgtagtagttccccttaaaaagaattatgaagaaatgaaacagattatccgtgaagaaatcgaatatcgtggtgtatctgttattataccacgcagagaatgcattcaaactttagcacgtaaaaaacgaaacaagtaaaaccatgaaaaaagatatcatactttccggcgttggtggacaaggcatcctctctatcgccacagtaattggtaaagccgcccttaaagacggattatatatgaaacaagcggaagtacatggcatgagccaacgtggcggtgacgtacaatccaatttacgtatcagtgatcaacctattgcctctgatcttattccttcaggcaaatgcgatttgatcatctcacttgaacccatggaaggattacgctatctcccctatttaagttctgaaggctggctggtaactaacgaaactccgttcgttaatatccccaactatccggcagaagctgatgtgcgggcagagttggataaattgccccataaaatcgttctgaatgtggataaggtagctaaagaaattggttctattcgcgtagcaaatattgttttgcttggggctaccattccctttctaggaattgactatgagaaaatacaaaccagcatccgcgaaatcttcgaacgcaaaggcgaggctattgtagagatgaacctcaaagcactggctgccggaaaagaaattgccgaaaaattaatgtaaagaccctccaaaacaaactaccatgaataacaaatactgggaagaagacatagagaccatgagccgtgagaagttgcaggaattgcaacttcagcggcttaaaaagacgataagtattgcagctaattcaccgtattacaaaaaagtgttccaagaacataatatcacagctgatagcattcaaagccttaaagatattcgaaaaatcccatttactactaaagctgatatgcgtgccacctacccttttggtctagtttcaggtaatatgcaggaagatggggtacgtattcattcttcaagtggaacaaccggtactccgactctgattgttcattctcagcacgatctggactcttgggcaaacctggtagcacgctgtctctatatggtaggcatacgcaaaacggatgttttccagaatagttccggatatggtatgttcaccggaggattaggtttccaatatggagcagaacgtttgggagcactgacagttcctgctgctgccggaaacagtaagcgacagattaaattcattactgatttcaaaacaactgcgcttcatgctattcccagctatgctattcgcctggcagaagtcattcaagaagaaggtatagatccgacaagcaccagcttaaaaacacttgtcattggtgctgagcctcatacagatgaacaacggaaaaagatcgaacgtatgttaggtgttaaagcttataacagctttggtatgacggaaatgaacggccctggagttgcttttgaatgtcaggaacaaaacggcatgcacttctgggaggattgctatctggttgaaattattgatcctgaaacaggagaacctgttccagatggagaaattggtgagttagtattgaccactctcgaccgcgagatgatgccgcttctacggtatcgcacccgagatctcacccgtattcttcccggagaatgtccatgtggacgcacccacctacgtattgaccgtattaaaggacgtagcgatgatatgttcatcattaagggagttaacatcttcccaatgcaagtagaaaagatattggtacaattcccacaattaggcagcaattatctaatcacactggaaacagtaaacaaccaggatgaaatgattgtggaagtagaactcagcgatctttctactgataattacattgaattggaaaagatacgcaaagagatcacacgtcaattgaaagacgagatattagtgactcccaaactgaaactagtgaaaaaaggctccttgccacaaagcgaaggaaaagcagtcagagtaaaagacctacgtcaaaatcactaattctttcaagagatcactctctctacataaaaaaacatcccatgaagcgaaataaattcatgggatgttttttatgtaataactccaaagatgacgaagtggcattaaaagaaaaaaaggaacggtaatcaaccaagattaccgttcccctttataaaaaagccgcaccgatgatgtgatgaaactccgaatgacatgatttgagcgctcgtcctctttgtaatccactgactcaaaggttaccccgaagggcgtggcccgccattgagaagcgaagcttgtctcggtatttcataatagtttgatgagtttcccgatccaatcaatgcggctatattttctacaacaaatgtagtaagtttccgtcaaagaaacaaggaaaaacatgattttgtttccttcaaacaagacattttatataatatctcccccactataagcaaaaagtgccgattactcattcgtaatcagcactttgtcaattatttgctaaataaacttaagcagcttttgctttagctacgatagccttgaaagcttccggatggttcatcgctaaatcagccaaaactttacggttgatttcgattcctgctttgtgcaaagcacccatcagcttagaataagacataccttccaaacgagctgcagcattaatacgctgaatccacaaagcgcggaagtttcttttcttgttcttacggtcacggaacgcataagtcagacctttctcccaagtattcttggcaacggtccatacgttctttcttgcaccaaagtagcctctggttaatttcaaaattttctttcttcttgctcttgaagcaacgtgatttactgatcttggcatagttttactaatttttgaatgttagcgccattacttcacgcaacggacttaaagctaatgcattcggttaatactttaaaatactttgtacgctttttacttcattgctaagagttccttaacttggcttacgtttgtcacgtcaactgtagttgaatggcacaagtttcttttttgcttcttagttttcttagtcaagatatgactgtgaaaagcgtgctttcttttgattttacctgttccggtaagagtaaatctctttttagaaccggagttagtcttcatctttggcatcttacttatttttaaattatttaaattatatggcaacgcactatacctgtggcgttactcatttcttttttattcttctgtttcagccagagccgctttcgatacttctgcggatttcggtgctgcaggcttctttggtgcctctttcttttttggagaaagctgaatggtcattcttttcccttccaatatcggcatttggtctactttcgcatagtcttccaaatcattggcaaatcgcagcaacaatacctccccttgttctttaaacaagattgaacgacctttaaagaatacataggctttcaccttatcaccatcttccaagaatcctctggcatgtttcaacttgaagttgtaatcgtgatcatcggtttgtggaccgaaacgaatctccttcacatttactttaacctgctttgccttctgttccttctgacgcttcttcagctgataaagaaatttagagtaatcaacgattcgacaaacagggggttgcgcgtttggagagatttccacgagatccacctcacgctcttcggcaagctttaatgcctgagctatcggatatacgtttggttctacttcatcgcccactatgcggacttctttggcacggatttgctcattaatccgatattgcccttttaagctgtcatttttcattaaataacctctatttccagtttgtttcttatttattactcccaaattattattttttaagttagataaaagctatcttcaaaacatcactatatgctatgcttttataagtgggcgcaaagttaccatttatttatcatattctgaacttcttcgttcaaaattttagcaaattcttcaaatttcatggtacccttatcgccttccccttgcttgcggacggaaacttctctattttcagcttctttttcacccacaatcaacatgtaaggaatacgcttcaattcgttatcgcgaatcttacgtcctatcttctcgttacgctcatccacaattgcacgaatatcgtattgtttcaagaacttcttcacttcttgtgcgtagtcattgaatttttcgctgatgggcagaatagccacctgttcaggagtcagccacaatgggaatttaccagccgtatgctcaataagcacagcaacaaaacgctccatagaaccaaacggcgcacggtgtatcattaccggacgatgtttctgattatcagcgcctgtatattccaattcaaaacgctccggcaagttatagtccacctgaatggtacccaactgccaacggcggccgatagcatctttcaccataaaatccaacttcggaccatagaaagcagcttcaccatactcaattctggcactcaagcccttttcttcacaagcctcaatgatagattgttcagctctttcccagttttcatcgctaccaatatatttttcacgattcactttgtcacgcaaggaaatctgagcctccacattggcaaagtccatggaacggaatacgattgaaataatatccatcacgcgcaagaattcatccttcacctgatcgggacggcagaagatatgtgcatcatcctgcgtaaaactacgtacacgcgttaatccatgtaattcaccactttgctcataacgacaaaccgtaccaaactcagccaggcgcaaaggcagatctttatatgaacgcggagaattcttataaatcatacagtgatgaggacaattcatcggtttcaagaagtactcctctccttcttcgggcgtatgaataggctggaacgaatctttaccatattttgcatagtggccggaagtgatatacaacaacttgttaccgatcgggggagtgataacctcctgataatcgtaacgtgcctggatacgacgcaagaattcctgcagacgcaagcgcaacgcagtccccttcggcaaccacatcggcagtcctttacccactgtgtcggagaacataaataaatccatttccttaccgatcttacgatgatcacgcttcttggcttcttccagcatagccagatattcatccaacattttctttttcgggaatgtgataccataaatacgcgtcatcatcttacgatcctcatgtccacgccaatatgcaccagccaccgacatcaacttaatagccttgatcggcgcggtagtcatcaaatgtggaccacggcataaatccgtgaaagcaccttgtgtataagttgttatgcgaccatcctccaattcggagatcaactcacacttatagttctcaccacggtcaccaaatttcttcaatgcatccgtttttgaaatactttctcttacaacagcttccttcttcgccactaattctgccatcttggcttcaatagccggaagatcagattctttaatgacagcttcacccggatccacatcataatagaaaccgttttcgatagcaggaccaataccgaactgaatacccggatacaattcctgtaaagcttcggccagcaagtgagcactggtatgccagaaagcgtgtttaccctgctcatcttcccatttatagagaacaaactcagcatcctcattgataggacgtcccaaatcataaatctcaccattcacgccacatgccagcacttcctgtgctaggcgtgaactgatactttctgcaatctgcagtcccgttactccttcgttatactcacgtacggagccgtctggaaatgttatctttatcataatgttgtgtatatttcaattttcagaacgcaaaaatagctaattcttttttgatattttattttttagcaaaaaaatgttattcacgcgtatcggtaaatctctttataatattataagctgatacgatacccaattcacccgccttactcagatctgtaattccctgcttgttgttacccaagaagatatgagtcaaaccacggttgaaataagcttcagcaaagtctttgttcaattcaatagccttattataatcctctaatgccccacggtaatctttcaacattgataatacattggcgcggttataatagccataaacaaaatcaggagccaattggatgacatgatccaaatcatttttcacaatatcataatctattgacgttacttctggttgtttcttactatcggaagaagctccgggaacaccttcagttaattcagcttccgcttttttatattccagctgtttgtagcgcaccaatgctcgcatgaaataagccgggaagaatttatcatccagcaaaatcgcctgcgtaaagtcatcaatggagctggcaaagtcttggaccaaatagaagtcaagcccacgtaagaaacgtttcttggcatctttgtcatctgcaacaatatccgaggtatgcgagtcgaccaaagcaaaatggaatctcacttgttcttccgtcaacggagcttccatattggtgatacgcaaaggcttcgggaacaatttagaatgattcaactcctcgatatacttatggaaatggacgatacgttttacctcgcttaatttctcataataggtcagcgcatacatcggctccatcttgatagatacattccggtcctgtacacgtccgcggtaatcactcttatacttctcatcctgctcagagtcgtcagcaatcacaatcttccggtaattgtccatattcttatcggactttttacgcgtcttgctcttatcctcaccatcctgagcattatccgcgacatccttattatctgctgtaactccgttacgtttgtcaatctgcatcttcatgagtttgaattcatcctgttcagcccccttacgatcaccgatcttcttacgagcttcagcacgatgataatatcctgccataaagttggggtattcatcaatcactttcgaataatcactgattgcaccacgataatttccggtctgtgcacgtagcaaaccacggttgaaggttgccatcatattatccggctctatctgcagaacgaaatcaaagtcttctattgcacggttatcatcacccacctgagcacggagcaaaccacggttatagtgtccgaggaagttattcggatcaatatccaatgccagatcataatcactcatggcacctctcaaattattctgatgaaaacgagccaatgcacgattaatataattacctgcattctttgcactcaaatgaatagaatgatccaagtcagcttcagcatccgcatactttccttgctgcagacggacaatagcgcgtgctccccacccgtcaggatcatagcgatccatttcaatcgccttttcaaaatcattcaaggcctgtatcgtatctttctgcttcagtgatacttcaccacgcatcagataagcacgagtgtatctgggcgctattttcaacaatttccccaaatcctctttagctgctccatagtcctccttctgcatgtggcaaagagaaagattatgccacaagacaagattttccggatcatatttcaaggctgtcttataatcctctatggctccgtcataattattctgccgaatacgagccaacccacgtatttgataagcgcctaccacaaaaggattacgttggatagcagcattacagtccgcttccgcaccttgaaaatcatccagattaatctttgccaaaccacgaaagaagtaaggctcatataaataaggcttagcgttaattacctggttgaaatactggatagaaagcacatagtcttcaaaatacaatgcattgcgcgcgattgtcatcacccgctccgtattgatctgcgcacacagcaacgttggaagcaacaggaaagccgtcagtatcttttttatcatcttgtcttataaatgcttgtaaacgaaacaaatttaatgcttttcatttacctagcaggattagcggaagactttttatattttttgagccttttataccatattataagattggcttatttcacagttttcactttatacgtgcaatgagctttgcccttcaacatcgcattcagttttcccttaatcatttgtttacgtaggggagacaagtgatcaataaacatctttccctccaaatgatcaaattcatgttgcatcacacgcgccagataaccttcaacaacctcatcatgttctaccatatcttcatccatatatgtaacatgaattctattaccacgtttcacagactcatggataccaggaagactcaaacacccttcttccatagatatttcttcaccagatacttcaaggatatgaggattgatatatgctttccgaaaattcttatattccggataatcttcagacagtacatccaaatctaccactacaacacgaataggaagtccaatttgtggagcagcaagtcccacaccttctgcatggtccatcgtttcgaacatattcgctattaactctttcaaaccaggatagtcgggagtaatatcttccgccacttttctcaatacgggctgcccgtacacgtaaatgggtaaaatcattgtttatctaattacaaattattaaatcactattatatataagtatatataccttattattataaggcaaaacgtttattctccaaataactttgtaggataatagtcgcactgatttcatctaccaaagctttattctgtcgatcttttttcttcagcccagcctccagcatagtacgatgtgccaaaacagaagtaaaacgctcgtcaacatactcaacaggcattgccggcaattttttcttcaacaaacgaacaaaaggctctattcgcttcatattttccgaagcttcattgttcatttgtttaggaagccctacaagaatgcgttccaccggttcttttcctacataatcaaggatgaacgtcaacagttcatgtgtaggtacagttgtcaacccgttagcaatcatttgcaacgtatcgctgacggctatccccgtacgctttttaccgtaatcaatcgctaatattctactcataatgggctacaaaattacgattaaaatttgatatttgacgcatctgctgtcataataacaaaaaaggaggcctaactcatgttaagccccctctcttgtttagagtttacaactctttgtccctatatcttattccagaattactactcggttcaaatagttcttaccgaacatgttagcagtaccaccgaatccaacgagttcgagctgatccttatcaacgccttccttaatcaatgcgtcgtaaacagcctgagcacgtttttcagacaacttctggttccaagaagcgctacccgtagccttgtcagcataaccggcaactttgtacttcttatccgggttagccttcagaatcttagcagccaactggatgttaaccataccgtaatcatcgatgcgagcgctaccaatcttgaagaagatggcacgaggaccggcaacttcaatttccttcactacttccttagttacaggcttagcgttagccaaagcattcttagcgttagccagatcagcctgagcctgagccagttcgcttctgtacttattgatttcgttgttgatagcattctgatcaactttcgcgccacaagctacgaacttcttgccaccgaaagtataggttgcacctacagttaagcctaaaataccttcagttttagcatcgcttacagaaccgaaaacagaaggagatactgtaccacgagcttcgaggtcgatagcccatttctggtcaatgttgtatttagcacccaaacctaagcttgcgccaaccaacagacgtaccttatcatctttaggataactcttagaaggatccagttcttgcttataagtcaaagaaccatcagcgttagtaacctcagtggtctttgttgcaagattccaagtactataagaatttgagatattcaatgtaggacctacaaagaacataaactcaaacttacggccttctttgtaaccgcagaagaggttagtcaggttcaacattgcatcagcattcaatgcaacgaacttcttcttatagttataccaattctcgtctttgcctacgttttcaaaagggtattgagtatgaagtttaccagaccatccggcaacctgaccacggataccccataccgggctgaagaattttcccagtgatatattcaccagaggtgttatggattcaccgaatccataatcaaagttgctggggttggtcacaacttgtccacccacgcctacactgataaagaaattgtccttccagctttcactgtagtacttttctttagtctgtgcattggcaatggttgcccctgacaacagtaaagataatattactaatttacttttcattgttttttagtttttaatagatttaactctttattacttattcattcttcaccatttctcttatttcaggttgaacctgaacatcaatccaccagtgaaatattgcattcgttgtaattccacctgtaaatgcaaatggttgaacaacaaataggtggcacccaacgcaaaatctttcgaatcatattccgctatcaccctcaaatccggtgcgaaactgggattgtaagtgatacccgccgctattccgttcagtttgtactcctttctctgattatataaataagagaggtgtactccgatttcttctgttcctatcggcagatgcttggttgcagctatatagaaacggctgaaatatccgtttccgcttgatgaaccaattacgccacctccggaagaagtaaacgggtctgatgttcccagaaccacagccggcatatacttccagaattgcccttctttcaaagctcgcagtcggacagagaaatatctgtcctgattcgtaaaacccgagtaaccgtaaggctttaagcccagtgcttccgctttaaaaagtgtgcatgtgtacgccacttccaaccaggggaaaaaggtcacattcaggtaatagttgtacgtatgatagtaccacgtaggaggagttatctccttgttcataaagttggcacccagcattattgtcttatctttctgcatctctgcggaaggggcatgcaacaaacctgtagtaccgtaagttaattgagccgaaagtacaaacgcacagcataaaaacaagtacgtaactattattcgcttcatctgcatctgcctttctctatacactttatactttcgggtcaattatgatctattgttcttaacaatcagaattattcagcttcgatgataccaccaccagcgttgcctgtaccatgaccgtggtcatgaccatgatcgtgagaaaccttaatgatttccatatcgtcatagttaacggtagctgtacctgcagcttggtattttgcatatactccagacagatccatgtttacatctgtagttgtttcaaccggttcttcatctcctgaagtaataatagtagtagaagttacctttgttactcctatagtgaaatcaacgaattcttgtttagaagtgatactcttaacagcagtgtaaggtgctaattcgaatttgtatcccttttctataagttcgtttttgtatccatcagcaacgattgtatcagtagctgccttcatagcttgagcaactgctacacctaatgcagtttcgctgccaaggttacctccctgtatgtcaatagtcttcatacctactaatactggaatatcataagtatattgcttaactctatcagttccatttacaatcataggatcgaaagtatctactgtcggtacaaaagtaggagctgcattagttcttgtaacttcaacattgaatgagaagtcaatcttcacttcaacattcggttcttctccacccggttctgtgctagctgtaggtttagcaatcttctgaactaaagtcatttcaataccattctcatcaacgatcttgaaagtagcactaaagaatttagaagaaatagctctggttgtagtttcttctacgaattcagtttcaggaacattaaacttatacgcataagtattggagttaccttcaccgtagaattgagtacccttgtcattgtacaagcgtacaaccttagccaacatccatctgttaccgaacttcaggtcacctgcaagaactactgttcctgtagcagttttaaccaaaacgatttcagttgcatattcttcagtagcgaacggatctgcgaagtcaatagctacttctttcttagcattcggtaaagagatgtattggatagtagatacaaatccgtctttgcttgctttaatcttatatgcaccggcagtcagaggagtagtttcataatctacttcttcggcacctttaccatatacagttacgtcagcatcgtcgattacattcatgtcttcatccaaaactgttactttgaggtcatatctcaattcaacttctttggttgtagctgttttgcctaacacgaaattaacaggataaacggcagcttgtcccggtttcaattcagcaatgttcacagtagtttcttgtttgtcgaaacctgtgcaagtagctgtaacttttacagcaccgtgtgacaagcctgaaatagtgaaagaaccgctgttttgagtaacagtacctttatctgatgcgactgttgcattagtcaagatagtaccttcagcactgtaaattgtacctgtaattgtgtactgggcggctggcaatgttacactctgatcgggatcgatgatatccaatccttcatctttgtaacatccagtgagtaatgaccctgttaaggccactacggctaatgctaatttagcattgtagccgttaaagaaacttttctttttcatctcaataaaattaaaaatttagtaattctgatttaataaaatatggattaaaactattattactcattatgttctcgcttgcgttagcccggaatcccttataataatagcgttcattgcctgcattataagctatccccatattctttgagggcgtcacccgcggtatatatccttttctcttatatttataaggtgggagcgctatttgaaatctaaaaccgccatttgactttgccccttgcgctttcattgcataaaagccaatcgagcaatagcggaagtgccgaatcaaatcaaatcttacgcctttttcacccaatagatattgttcacctttcaaacttgcctgaacattgtattcgggccaataaaaattagctcctaaactccatgtcaagcgtgtctttgttccatagtaaaattcaaatccatcccattcatacgcagcggttaatcctatgcgtccttcaaacgaaaaacgttcatcggcttttaacacatgaagcaatttcaaatcacctccataccggcttgcattaaatgttccgacagttcctgtaagccatgtattataaggtaaacgaacagtttgttgcaatgtcagaaatccaggatgtaccttatcagctaaatcaccatacccgtcattataaaccgggaaaataacctgtgcggtcaacttcattcccttccaaaatgaaacttcaactgccggtgacaagttaaaaagcacttggtatacctgcgtaatcaccagattctttaatgaaacttccggatacacaactacatctaccttaaacaaagaactattttttctcttttctttccgaaccagcttccatgagtcacctaaattgtaactaacgtcccaatccgcacgacttgcttcagggacgctgtcaccgattatcggtttatagtaaagagaaatttgaggtatattattatctagaacaattattctgcatggctttttatccgagaaactgagagaggtattgataagaatgtatttatttgattaatgcttgataatcaatcaatagtgtattgtttacgaaaagtgaaatattgagatatttatcgtttttcatgttatgcaaagctttattgttacctgtttgtttccctattcatttggtgtatctaataattatttaattatatatttatcaaaaagaatcattaaagaggtttctgatgtcaataattgatatttcctaattcaattctaatattgccacataaataatttcattaccaaccggaaattacttgatttctttataacaaaaaaggtgtctatcaatagctagacaccttttctcttttatagaatttctattataagaaatcttattttattccagaattactactcggttcaaatagttcttaccgaacatgttagcagtaccaccgaatcctacgagttcgagttgatccttatcaacgccttccttaatcaatgcgtcgtaaacagtctgagcacgtttttcagacaacttctggttccatgaagcgctacccgtagccttatcagcatacccggcaactttgtacttcttatcaggattagccttcagaatcttagcagccaactggatgttaaccataccgtaatcatcaatgcgagcgctaccaatcttaaagaagatggcacgagggccggcaacttcaatctccttcactacttccttagttacaggtttagagttagccatggcatttttagcacttgccaggtcagcctgagcctgagccaattcgcttctgtatttattgatttcattgttgatagcattctgatcaactttcgcgccacaagatataaaattcttgccgccaaaagtataagtaacaccagcagtcagagacaccgcaccatctgtataggcactactcttattcccaaacatagaaggagatacttcacctcttgcctcaatgttgatatccaaatacttgctcacattgaactgtcccatcaaacctacagaaccgttaatcaaagcatttaatttatcttgctcaccataagcctttgcaaaagtcaatccgggacctgcgaacacagataaagtaaataagcgttccggattatatccgcaaacagagttagacaggttatacatagcatctgcacgcagagtgaaatacttcttgttcttaacctcagcataagtgccttttatttgtccgcgctctgtatacagtgtcgaccataatccggcaacttgtccgcgaactccccagataggattgaacagtttacccactgatacgtggatcaatggcgtgatggcatgtccaaagccataatcaaagttatcaggattaacacatgcctgagctcctacaccagcgcttataaagatattatctttaaatttttcgctgtagtatttctctttagtctgtgcagtagctgtaagagctaatcccgccaacatgatagatactataccaaatttacatttcattgttttttctattttaaaatgattaactctatgctttttctgccagtttctttatttcaaccggaactggaaacacaatccacccgtgaaatatttcatcttttgcagttccacctgtatatgcagatgttttaaaagcaagtaagtggctcccagtgcaaaatcttttgaatcatactctgcaatcattcttaattcaggcgcaaaagttggattataactaatacctgccgctattccattcagcttgtactcttttcttttattatataaataagaaaagtgtacccctatttcttcttttcctatagagatatgcttggtggccgctgcatagaaacgactataatatccgtttccttctgtagaaccaatcgagcctcctccggatgaagtaaatggatctgatgttccgaaaacaacagctggcatatacctccagaattgtccttctttcaaagcccgtaaccggatagaaaaatatctatcctgattcgtgaatcctgaatagccataaggctttaaccccaaagcttctgccttaaacagggtgcaagtataagcaacttccatccacggcaaaatggtaacattcaaaaaataattgtacgtatggtaataccacgtaggaggagttatctccttattcataaagttccctcccagcatcactgttttgtccttttgcatctctgccgaaggagcatgcagtaaaccggtagttccataagtcaattgagccgaaagcatggatgatacactgataagcagtgtcgcaataaacattcgctttattctcattatgtataatctcatgctttaggttcaattgcattatttaaaaacaggcctattcaaaatcgataataccaccacctgcgttcaaatcttcaccattgccatgtccatgagtgtgaccaatagcataatttgcagtcagagttgtagagataatctttttaactaccactgttacgtctgtagtttttttgttcttatcaattacatgaacagtatatgatcttcttacttgttttctgaccatactgaagttatcaatttgcttgtatgcaggaactgatatatctacagacagagcagtttttgagtagctgttcttcggtgcaatattagcattgtcttttagaatcatatttttcagtaacattgttacgtaagatttcgtttctgcattcataccagacaaggcagtttcaacagccaaagcaggagtgtttccatcataagcggttccacccatgtagtttccttttacagtaactacagcggctgcagagcctgtatagcaaggtttattgatgatttcggcatccaacttaacactgtctactggaacgatggctgactcaaaaccgaaacggaatttggagaagtgattgattttaccaacgaaagtacctgaagtcatatcgtattcagcataattattagcatcagctgaccatacaccggttttttcgttttgataaagaacacctaatacatagtcaggctctacagtaacagtaaccggagcctggaacttaacttccagcggttgagagaatacagtaccgctgggttgtccttcgtaagtacgtacagcagcagttgccttttcagtttgtatatcacgagttagtttgattgcttgagcttggccacctacataataaacttgtgtgttagcaggcaatgtgatctggtcggcaacagttttagtctcttgagttgtttcacctgttgtttcatcaataacagcttctgtagatacaagttctactacgagagcctcttctacttttaccactggaatatcaattttagtaatatcttcaatacctaattcttcggcaactttctcgatgtctgctttaacttcaggttctttaatatcttcaactttcgttggctctgctttatctacaggcacttcgatagtttgttcaccacccttactcggatcttcatcagggatatcactgctttcagctttcaatacaacttcaatggaagtcacagaagtagcaccggtctcaaccagtttcacaactgtggcttttgcttgtgcaacataaccagcttttgaaactgtaataatagccaatgttgtaggagtgatatgttcagctgccacttctatattgaaataaccacgattgtcagtagtaagatcagctttgaattcaccaacttcaacttttacagtagcgtcgggcacagcagcatctttttcattggtaacgaagccgcacacatagtatttagacacctttgcagtttcttccttttgcatcaatacggcaactgtagaggttacaatttggtcgccttcaccttcttcagcagcaacaggagctacagcgatggtagcgtaagcgtttttgtaaccttcagctttaagaacggcatagtaagtgcccggctgtaccccttctactgtgaatgtgttattaacaactgcaattgtacatccaggtataactactgacgacaattttacagcagcgctactttcatctgttgcagtaccttttatggtatattttacagttttgtatgtcggagtatcatatcccggatacatagctgcatttactgtgtagacagcagttttgccattttcaatcttttctacatacacagaagttgtgacagttttgtaatcatctttagtaacagtcagaacattcagcccttctgttgcatctaaagcataagttccatcggtagcagttgtagcaccattaaccttggcaccagacaacggttctccggtagaagcattagaaacgacacctgtaattttgtataccggtttcactgtactaggtgcctctgtcgttaattcttctttttcgtagcagctggcgaacatgccgcagattgctactaacattaacgctaacttcacgttaataccaaacaaacttttctttttcatctcaataaaattaaaattaataaactaataattctgatttaataaaatatgggttaaaactatttgattgcattatattgtcaccgggtgatgagcgatagttcttgtaataatattgctcgtttcctgcattatacgccagccccatgtttctggagggggtaaaccgaggaatatatcctcttcttctatatttataaggtggcaaggcaatctgaaaacgaaagccaccattggacttcgctctttgcgctttcattgcataaaaacctattgaagcatagcggaaatgccggataatatctatccgcacccctttttcacccaataaatactgttcaagtttcatagtcgtttctacattatattgtggccaatagaaataacctccaactgaccatgtcatttttttctgtgttccaaagtggcaagtaaatccatcccagtatgccgcccctgtatatccaacacgtccttcgattccaaatctattatcacggatgaaacgatggctaattttcatatctatcccataacgttcgctactgaaatgccctactgtaagtgttccccagatattatagggtagtcttaccgtttgtgacacgccaataaaaccaggatgtattttattatacatatctggatatccgtcattataaataggtacttccagttgtgctgtcagtctcatccctttccagaaagaaacttctattgccggtgccagattgaacagaacttgatatatctgcgtaattactaagttctttaatgacaattccggatatattaccacgtccactttgaacaaagaactattctttttttttactttaccagcctttttccagttactgcccaaactatagcttacatcccaatcccgtcgagctacccctggtacactgtcgcctataattggtttataaaataatgaaatttggggtatgttattatccagaacaacaatccgacatggctttttatccggaaatcaggataaagaaatcttagataaattaaacatacaattagctagtatttagcgaattgcataatactaaacaatatcattactttcctttattgtttcttttttagacattaatattatatatttgttgctggtttgttactatttatacattattggagcaaatggaccttccttttatttttctagtactcaataaattaaattcaaatagaagtagcagaacagaataaaactcaaatgcgaaatcatttggaaccggtttttgttaccatgttgttaccgtataaataaatgtgtatattatttttaataaacaggagattctaaacagagatatgaaagaagaactaagaataaaagagccaataaagctaagagtcaaacatctggctaatggcaataagtcgatatatcttgatatgtatatgaatgggaaacgaaaatacgagtttctgaaattatatattatacctgaatataataagtcagacagggtgcgtaatagtgaaacgctaaaattggcaaatgccattaaggctcaaagaattattgaattacaaaatcagagccacggttttaagatcaataagacatctcacattagactaaccgattatatacaaagtgtagctgaaaagaaatcggagaatgaagttcgcaaaacggtactacacgctgtagtctatcatcttagacgttacaaccctaatgatatccaattaagcaggatagataaagattatattttgggatttctggattacctaaagacagcaaaacaaactcataccaagaaagagaaattgctgcatgtcaatacccaggtctattattacaaaatgctgagatattgcctgaattatgcagtatcagaagaactgatatcagctaatcctatgaataaaataaaaaatgaagaaaaaccacataaacaccgtacggaaagagaatatctcactattgacgaattgcgaaagctggctcaaacccctttttataatggtttactaaagaaagcttttctcttcagttgtttttgcgggttgaggcattccgatatcatagcgcttacgtggggagacatagaaatggatgatgatggcaatgcccggttgtatatcatacaaaagaaaaccaaggaagccatttctttgcctttaagtcaggaagctataaaacagttaccgaagcgagaagatgctaaggaggacgatataatattcaaaaagttaataacattgggaagaactaatgaaattttacctaaatgggctgaacaggccggaattaagaagcatatcacatttcatactgccagacatacccacgcaactatgttgttaactttaggcgtcgatctgtatactgtctccaaactgcttgggcataccaacatacagactacacagatttatgccaaacttgttgatgagagtaagaaaaaggcaattgacctcatacccaatataacataattgtgaactcagcgactcaataataagttggctcaagttactctcactaccctcacttttagtacgaatcgttgataactaatatattaagtgtgagtgagagtaaaatccgggagtgagagtaagtgggctactctcactctgtctcgtcctttctcacgccctaactcattctattacatcatgttaacttacatttaacgaatatatcgaacaagtctgtaatcctatatttttcagcttttttccccgcataaacggtgaatatgcccgtcgcagccgatttatcacgctgcataccctttgcaagtgctttttgtcaccgtatagcgctttacaaacaagtcgcgttattcaacactgtccgggctgacaagttcccggcatcggctatccctactcggaaattgtgatgatgcgataaagcgagagatttcatttctttctgaaaatatagtctctattgttgttcttcttttacatcttattttgtttactatccgccgtttgcatcggataactttagcatcactgttcttgatacgtacagattgcctgtttgatgctctggtttctccatttggaattgtgagtttcatgccgtgaaactcccggtttcaataggtgaaactaacggtttcatgccttgaaactatcggtttcacggtatgaaacaaaatggtatcaccccatggtgagtgattttattcatgactttaccttgctctcacttcgttccctgcttaggattcataattcaattgagcaagaaacaagaaataactgatattatcctaatttccctccttctgggaggctgcgacatacacttaatagcctgcatttcgctactctttagttctttcttttcatcatcacaactgtcgggtcaaaataacggattcacagctaactaaaagtacagaatgtcaaaatgattaccaacttgttttttgaagctctgcatattgaaagctagacctcccgaacttaaaaaatccatatcgtatgtttatagaagaggttataaattatcattatatacacgtagaacaagcttgcggaacccttaaataaataataattcgttttttatgaaaggtatatataatcaaaattacgtttgagggtatatttttcatataaatgtcgtatttattagtcatttattaacctctttatcacgcattataagctcatagacaaagaatattagctttatgagaacaattatgcagaaaaagctacattattttattttttcatgtaaaattctttggtattattaaaaatgtgtctatttttgcaccatattttatgtcgtaaagatatgaaaattgaataaataaaatgaggtatagaaactctaacatgagaaagtgtctagctactaaaacaatagcacgatgtgcggcgctctttttattctgtttgcttcctttaaaaggaatttgccaaacaggagaaagtacggtgaacactttagtagaaatgggatttgaaaatgtggggtggacagaagatggcaaagaacgtgtatacgtcttgcaaaattctgcatatcgtctgaatggagtcggcattggcaaggcggtagacattattcaaaaaatgggtttatcggataaaaagccatgtcgggtaattgttttggacaataatgtacctcagatttctctctactataaaccgataatcggtgatagcgttcctgaagcaagccgtgcggactggaatgtcagttatgatttaggtggagcatggaagaaagcgaaaacagtgaagaaaaagaatagttctttgtttaaggtggacattttagtgtatccacaactttattttaagaatcttatcataacgcaaatctatcaagcgtgtctggaagtaagtccggcaattgagatttcgttatggaaaggaagccgactgaccgcgcaagttatatttccggtatataatgacggatataacggtgccatgaaaaacatacggtgggggtatctgactttagaccaaagtgtacgattgccgtacaatgtatggcttaaaacagtagttggagtatttgacaccaattgttatggagcggaggcaagcgtattccatcctttgaaagatgaacgcttctctttagaagggaaattcggattagtagggattggatatttcaataatttcagttctttccgatataacggagaaacgagatggtattggtccgtaggcagtaatttttattggagtaagtataatacagaattcaaacttcgagcagagcaatatctattaaaagatgtaggagtggcaatagagatgacaagatatttcagatatgcagcagtgggcttttatgcggagaagtcggataaagctagattaaacggaggattcagaatatccgtagcacttcccccttatcggtataaacgacgcggacatatgccgagaatatctacaggttttggtactggtataagctataatgccggaaacgaatcgaaatattatctgatgcctcatacaagggctgatgacaatgtactgaaaagaaatcaatataacccatattttattaaatcggaattactaaatttttaattttatttgagatgaaaaagaaaagttttttgaatggcctttatgctaaaggagcattggctttaactattgtagctggtttcacactggctggttgcgaaaaggaagatttcaacgtaaatgttcctgatattaatattactgtaccggaagtagatctgggagaaggagtatttgttgtaactttgagtgctacatcagcaagtggaaatactttggagggtgtaactttcacggatgcaagtggaaatgtccttaacaaaactatcgaatataaaactgctgcagatattacagtaactgctaaaaaggatggatataatacagtagtaaagactgtaaatatacctgctcctgtaaagggtgcttataatatcataccagttagttttgttttgtcagcagtagaagatcccgtccaaatacctgaacaaggtaatcctgtagaaggaaaagatcctgttaaaggcgaagaaacaaaaacttacgcagatgagtttaaagctaatacaccttatattcttgatgtagaagttccttttggtgaattctatacagctgaacaaaaaacaaaacttctgaaagctgttgaagaattaacaagtcctacaactcgtgcaggtgaggatgaagaagcaaaagcaaacctattgatagctaagaaaaatcttcgtgctacaattgatgcccttcccactagcgcaaagaaagagttgagaccggttacttttactttaacagaagctgctaaatccgttactttctctattcaaacgacatctgaggtttgtagtgtgaaattcagcactaaagttgccggtgaaacatacgaagtggaaggtgaacaattagtagtagctaacaacgaaattaaagcaactgccgaaggtgtagaaattggtcatggtcatggtcacggtcatggtgacgatgcaaacgctggcggtggtatcggtaataaataaataaaatgaataggcatttagtaacctattttacaaaatgtattatttaccctgaaaaaaagaaaatgaaatatagatttttaatattatctcttctcttggcgggcgcaaatgtagccactgttgatgcacaagagaagcagaaagcaagcgataatatatttatcggtggcggtgtgggggcaatgacggtcttcaatgacggtcttaactcacctactctcaacatcaacgttcaggttggtaaatatctgactccgacttggggtatccgtggtgtggcaagcgctgcatggcaaagcctggagaaacaaaataccggctatagtaactattgcaaaaagtttggagaaatcaatctggatgcaatgctgaacctgaacagcctctttggcaacaagaacgtaaatcgtgcagtagatgtatacttgtttggtggtcctaccatgaacatcgctacggcagtagatggtgtagttgtttataacggtggtggagatattgacttaactcccggaactacaacagatattacgttaactcccgaatcatatttcaattcacatggcgttaaagctcgctttggtgcaactgtcggattgggattggggtataacgtatctaataagctggctatcacactagaaggtcgtttcggtgtaactccctccatcttcggtaatggaagcgactgtcgtaaagctgaatccactggtcgcttaaatatcggtgctatctacacatttggcggtaagaaatttgtttctaatgcaacagttgaccaagatgctatcaacagagaagtaaataggtacagaagcgaactggcacaagctcaggctgacttggctaacgctaagaacgctttggctaacgctaagcctgtaactaaggaagtagtgaaggaaattgaagttgccggtcctcgtgccatcttcttcaagattggtagcgctcgcatcgatgattacggtatggttaacatccagttggctgctaagattctgaaggctaacccggataagaagtacaaagttgccggttatgctgacaaggctacgggtagcgcttcctggaaccagaagttgtctgaaaaacgtgctcaggctgtatacgacgcattgattaaggaaggcgtaagcaaagatcagcttgaactcgttggattcggtggtactgcaaatatgttcggtaagaactatttaaaccgtgtcgtaattttggaataaaacaataatccaactcaggaaactgagaaacctctaaagatgaaggcgtctgagaattccggacgccttcttttttaaaatacaaatccacacacatgtgttaatcataatacccgaaactgtttttcaattatgaaattcaaactgttccttatcgtttggtttgctttttttcctttcatgctttctgcgcaattgacatacggcacaaccggattgttgcatgccccttctgcggaaatgcaacgtgacaagactttcatgattggcggaaacttcatgaataaagagttgacaccttccacctggtactatcatacctataactattatttaaatataaccttttttccctggttggaagtagcatatacatgtacgcttttcaaagcagaggcactaggattaaagccgtatggttattcaggatttaccaatcaagacagatatttttccgtccggctacgagctttgaaagaaggacaattttggaaacacatgcctgctgtggttttaggtacctccgatcctttcacttcttccggtggtggtgtaataagctcaacagaaggaaacggatactacagccgattttatattgccgcaaccaaacatctaccgatagggaaagaagaaatcggaatacacctttcttatttatataataaacgaaaggaatataagttaaacggaatagcggccggtatcacttactctccgtctttccacccacaattgagggccattgcggaatatgattctaaagattttgccttaggcatcacttacctgctgttcaaccatgtacacatgcagatagaaatgcaaaaaatgaaatatttcagcggtggattaacctacaaagtttatctgaaatagaatattcattggaaaaagttccccctgtcacaagttcgtgtaacaaggggattttttgaatgaaataatataaatcaatataccagtttcacattatcgatccagagtgaattaccgggagaacctatgtatgctcctccatggctggaagtaaactgcaataataaatgtgtaggcgcatcttcttctgttccccatgccacttctttaaccggaacactttcacctttactgttaatagcgtaacgttcttctacctgcaaacgcatcatatggggcttataagcaggatcaccagtgatatctccatacatgattgaataggtagcattattacgccaatcagtggtattataatagcgaactaccatagtccctacccgcttagcaaaaatattgccatccttatcttcccaacgcttctgcaaaaacaaattcacctccgggaagtctttaccttctacgtctgttatccggctaaaaccggtagcacgaatccgcttttccctatcagacatattaactttatagtcaaactgcacagcgataggtttcttggtaaaggggataccggaattcagcatcttttgcggattctttgtgcccttaatcggctcatgcacttcccccaaaaacatagaacctgcggcaagtactgtgatatcaacaatacccaatacttttacactttccatacgggtatccatacgggcacagtagccatcaccacgcttctcgggaaacactgaagtattggttttagtaatacccgccacgcgcgccatcacattcgaagtagcccatggcgaaccacccatgttcttataggccttattctcacgaatagtcgcagtcggtccaatagcatatacattcttcaacgcaccaccgataatgcctgactctttaatctgacggtctatccattgatccatgtctccgaacggaatcacttccacagtatgctgttgctgctgtgcaagtgccgttccgcaacataaaaaagcggatagcaagccgtacatacaaattttcttctgcatcatctcattagcttttttttaattaaagttcatatttccactgctccaatgcaaagttccagttatcctgaaccaattgcacggtgcgatcatcatatttatatttattcttcttatatcccttctttccacctacatacttttctatatcattgcgtgcttcagcaaatccgggaatagacaagccacgataaatctgctcagtcatccccatagcatccgcttcgaagtcttcgaactttacttccatcagattaccggcaggaatacaagatttatcagcctcgtatttatgatacagtttggcataaatagaaagaatattcttttcaatttcgtcattactgatatcctgcaacttcaacggctggattgtattcgtgaagaaacttcgggtactctcgaacaccgtataaggattacgcatcagatagataaatttagcattagggaacattttgaccagttctttcacacgtcccgtatggggtggattcttactcaagaactgtgttccgttagtattccacaatgatatcttaatcagcttgataaacacttcttcaaaaaccttcagttccttttccgatatatcatcgaacagcaaatatttatctgcatattcttgctgatactttgggaggaaccagaagttataataggtataaggcatcatattggcaagtgcaaactcttcttcctgtggcagatctacagcaagttccatgttatctgtaggacgcttatcaggcatcagccagctcatgttcttcttgaagaaaggctgtccccacatcatcagatgcggaaatacagtttggtaagtagtattatagccaaaatgcttgtcacatgagaagacattatgcacaaaggtcgtcccgctgcgccaatggccaagaatgaataccggatcatgctctaacggttgggatgccaaccgtttctcataacgtccgttctgcaaaggagccagtatagaaagcagacgacataccgccttagtcaaacggtatttgcctttgtatgccgcatcaatttcccgccctttcgtaatagcattaaatgttttccaatcggctcccaccaaagtattaatagggagtttgttaaattccagtaaacccataattatggtacattatttgattattttcacttcaataccttggcgcttcaaatctttcaccgctttttctatagcttcatagtgctcgggagcaatacctaacttcggtaagttcaaaaccggaagatcttcagaaagatgcatatccttatcctctaccctatcgataatcataccgacagcactggtattattggtaatcggatcaatcagaatgaatgcacctgttgccttatttttttgataaggatcaaagaataattccttggcagtagtaagaacaacacgggctatctgatttaactgcataggcagatcatcaggcgtcaatcgtccattatcaacggacaactgatccatcgtattaacatctactttatatttaatgttactgatacgtgaacgactcaaattagtagtctgcttgatgaagaaggatttattgagatccatcggctcttcatccatccacaccagcatagcctcaaaattgcgatctacaaccggtaaattatcaggatgtaccaacatctctcctctcgatacgtcaatctcatcttccagcgttaaagttacagattggggcggaaaagcataatccagttcgccgtcatacgtaacaatgctcttgacacgtgattttttgcctgaaggtaacgctatcacttcatcccctttacgtactacccctgatgcaactttaccgcaaaaaccacggaaatcaagattagggcgcaatacatactgtaccgggaaacggaagtccgacaggttatgatcgttatcaatatggacagtctccaagaaatcgagcaaagaaatgccattgtaccatggagtgcgttcagacctctccactacattatcgccatccaaagcggagagcggaatacaagtcacatcaggaatacccaatggtgcaataaactgtttatactctttaacgatttcattaaagcgctcctcagagaagcctaccaagtccattttattaacagcaagcaccacgtgcttaatgcccaacaaagacaccagaaaagaatgacgacgcgtctgtgtaatgacaccggtacgggcatctacaagaatgatagccagattagccgttgaaccgccggtaatcatattacgcgtatattgctcgtgccccggagtatcagcaatgatgaatttacgattattagtagagaaatatcgatatgccacatcaatcgtaataccttgttcacgttctgctttcagaccatccagcagcaatgcgtaatcaatgtgatcaccggcatttcccatacgcttactatcacgttccaatgcatctaactggtcttcatacaatttcttgctatcaaacaacaaacgcccgatcaacgtagattttccatcatccaccgaaccggcagtcagaaagcggagtaagtctttctgttcgtctttatccagaaactccttgatatttagtttagagttattctccatcactttttactttttaattgtcacctttatcttcttaaacctaagcattaaagttctaaaggtcaggtttaagatttcaatcctcaggttttaatttttaattcttaattcttaaaagtatccctcacgctttttctgctccatactggcatcctgatcaaagtcgattacacgggtggtacgctcactcttggtggtagtcatcatctcctctacaattgtctcaatcgtatccgcattgctctctaccgcaccggtcaacggccaacagcccaatgtacggaaacgtaccattttcatctttatctgatcacgatatttttcaggcaggcggtcatcatctgccataatcaaattaccatcaatttctacgcacggacgctccttggcataatacaacggaacaataggaatattttccaaacgaatgtattgccagatatccagctccgtccagttactcaacgggaacacacgaatgctttctcccttatgcacacgggcattgtagatatcccacaattccggacgctggttcttcgggtcccattggtggaacttatcacgaaaagaaaaaatacgttctttcgcacgtgatttctcttcgtcacgacgagcacccccaaaagctgcgtcaaatttatatttatccaaagcactcagaagagccttggttttcatcaagtctgtgtgtactttactcccatgagtaaacggtcctacacctgcatgaaaagcctccatattgctttctactatcagattccagccatgttttttggcatactcatcgcggaattgaatcatttccttaaatttccacttcgaatcgatatgcatcaacgggaagggtactttacccggataaaaggctttttcggcaaggcgaaccattaccgaagagtcttttccaatactataaagcatcaccggattttcaaattccgctgccacttcacggatgatatgaatagactctgcttcgagttctttcagatggctcaatttatattcttccattttttatataatcactttttaatctgtattttcggtaaaatgaggtcgagcagttggttgactgactcttccaggctgagttttgaggtatctaacatcaatgccggatgaaggggtgcttcaaacggagcggaaatccccgtaaaatttttaatctctccccggcgtgcctttgcgtacagcccctttacatccctacgctcacactcagtcaaaggggtacttacatacacttcatagaagtcctcctgcccgatgatattagccgccatttctcggatatcattgttaggactgataaaagcagcaatagttataatgcctgaatcaataaaaagtttggaaacttctgcaatacggcggatattttctacacgatcagcttcagtaaagcccaaattattattgatgccgctacggatattatctccgtccagaatgcggcaaagtaaacctcgcttatgcaattcgcgctccaaagcaatagctatcgtacttttaccggaaccgctcaatccggtaaaccatatcatcacactatgctgaccgagaagttcttctttatcctctctcgacaacatcctatcaaaaatcggatatatattattgtctgtcataatctaattattaaaagggccaaattaatggaataaggaatatggatatcaagaaagctataatattcagcggcaatccgatacggacaaaatcagtgaacttatagtttccaataccttgcacaatcaaatttgtctgataaccgataggtgtagagaaactggcagaggcagccatacagatcactacaaagaaaggcatagggctgacacccatctgcgaagaaatggagagcgccaatgggaaagctaatgcagcagcggcattattggttatcaattcggtaaacaaattcgtaatgataaatacagctgccagtaacacctgaggaccgtaatgttcagtcataccgatgatataacttgccactacatctgccacaccggaattaaccattgctttactgatggcaaaagcacacgcaattgttatcaggatatcccatgaaatgtatttagtgtacttacgggccggaaaaattttagtccacgccataacgatagtagtcacagaaacaaagaaaaacatatccaacttgatattcgggaatgcctctttcacaaccggcagctcgcctaccgtagccccggtaatcatcaatatcagtaataaaagggcaaaccaacgtttcccctttccgggaaccggttcgttatctttgccattggccaacaaaacgaacacggaagactctccccaagtttgaacaaaagaatcatccgccatcaccactaatgtatcaccctcacgcaaaacctcattatccagattcgtagtaatactttgtccgctccgctttatttccttaacagctgctccatagtgacgctgaaaattaaactctcccaacttcttgttaataccaggaaaacgaggaccaagtacagcctcaacccgatgcaaaccaacatcttcttccggttcgtcatcttgcttcacagcatccgtacgaacatccggcaagagtttagaagaaaatagaaataaataaataattcctgctatagctatgaaaatacccactttgcctaattcaaacatagtaaatccttcataacctgcctctaatatcatgccgtgtactaccaggttagtagaagttccgataagagtacatataccccccaaaatagtcacataagaaagaggtatcaaaaacttggtagcaggtaattttaccgactccgcccaacgcttgattatcggagcaaatattacaacaacaggggtattattaagaaaagcagaaataaaagagatagtgggaagcatacgaaattgggctttaaacacagtcgtcttgccctgaggaagcaactttttgataacctggcccaatgctccggactgacgaataccctcactgaccaaaaatagcatagctacggtaatcattcctttattactaaaaccttccagcatctctttgggtgtcaggatgccggcacataagaacaaaactacaacggaaaatagcaccataccgggacgcattttatccaatgccaatgccaccaccatgcccaaaagtgccaatagcacaaatattatctcaaatgtcatacattatactgtatcttgttactatttcatttgcttaggttccaccacaaaccacggattcagtaaattctctttattgtaacaaagcggctcttcttttccagcctgataaacttccaatccggcagcacgtgctatagcatgtcctgctgccgtatcccattccatggtaggtgcaaaacgaggatatacatccgcctttccttcggctacaaggcagattttaatggaactaccactagatataagttctacttccgagtgttgacgcttcattccttcgatataagcctccgtctccggagttagatgcgaacgggaagccacgattacaaatttacctctttcggtaacagaaggcagacgggtagcggatgcaatcaattcatccagtgaagcatttccgcgagaagttacattggagagtttgtatgccccaatgctttcttctgcaaaataaagttcctgtttcacaggaagataaataactcccattacgggtactgaatgattaacccatgcgatatttacagtaaactctccatttcgtttaataaactccttggtaccgtccagagggtctacaatccacaaagcatcccatccacagcgttctgcatagggtaaatgtttcccttcttcactcagaatgggaaaaggagtatcgcacagaaaaccggtaatcgtttcatgtgccttgcgatccgcaatggttaaaggggagttatccgcttttttttctatttcaaagtccgatgccgggtcattatagatggaaagaatgtctgcaccggcttgcagagcagcatctattgcgcttaatatatatttttgttccatatatggtatctatacttacacatagtgtgcaaaattaaaaactttttcatcctcaaaagtttccgagcttcgttttataacttcttttaaactacctaatacatttataagcacttttcacaatcaataaatcaaaaaaggaactccaaacgttgaagttcctttttcgtctacttttacctaatctctacttacatctactttttattttccacagcttcacccgcccattctacggcacctttttctttcagctttgccgtgatttttttagctttctccatagcaacactttcatcttcaggggaagcataagcatgcttataccccttcactttattccattcgccacgggtaaagtccgggaaagcaacggctgcacaattgttatccatagacaattcgcctaactcagccagacaacaccattctgccaaatcatagacatccatatctaaaggaagtccattttgcaggcaatataccaaacggctatccatgataaagtccataccaccatgaccaccaacttcttttgccatttcaccatatttcttcaggatgggatgctggtatttctgcactagagcttccatatcttttttaggcataaaactatgggaattcaagttatctacctcaggtgcaactcccgatgcattcagttgttttgcatccaatgcataacctgctatcggatatttatttgcgaaccccttggtaccggtcaactgatatagacggttatagggttgcggagtcatcacatcatgttgtatctcaatcacctttccattttccgtacgaatcaacgtagttgtatggtcaccgttacggaaattctcacaaggctgtcccgttctttcctccaccaacgacttacctactaccgatttggtgtccatagcaacgagtgtcttcatacggtcaccacgatgtatatccaacgcttgcgctacagggccaagaccatgagtggcatatacatctccccgatgcttcatattatattccagacgccaacccagtttgtcattttcaccattcttccagtaatgatcccagaaaggttccagattatgaatataagctccctgggcacgaacgacctccccaaacacaccctgttgcgccatattcagagtattcatttcaaaccagtcataacagcagttctcaaggatcatacaatgtttgcgagtcttctcgctcatatttaccaatgcccaacactctttcaagtccatagcagaaggaacttcgatggcaacatttttattattctccatcgcacacatagcgacagggaaatgatgcagccaatctgttgcgatatacaccagatctatatcatcccgtttacacaattcttcgtatcctttttcacctgaatatatagctgctttaggcatagaagctctctgtaaatacttctgacatttctctgcccgttccttttcatagtcacataaagcaacgatttctacacccggaatatacgtaaaacgttctacggctccgggaccacgcattcccaaacctacaaatcccacacgaaccacttccattttaggtatcgtcagccctattacacttgtttgttcggccggacgctcgggagtttctacaacaatcgttcccttgtcccaactccattttgtccctttgtctgaaacttgttgttcagacgatgttttagttgtgcacgcagctagcgcgatacacgcgctcagcaataaaaatttaaatttcttcatacataaattattattgtattcccttaataagaggaatatgttattcataacattacaaaattaataattataacgtagtgacttgtctacatcgccttttgccctcactggtacaaatgtaaatccccattcataattttgattagcgggtatcgtatagccaggctgcacttttgctccccaactgtcataaccagccactccttgctgtctcatatccacacaaacctccacaaaatttcgaggaacaatatcattaatatgagtcattttccgtatcagatttctggcttcatccacattatgctgattaatttcctccggagaacgattcctccattgatatggacgcgatgattcttccgaatcaaaatcctccactgtatttctcaaaacattaaagcctatagtctgtttagcctgaaccaacaggccccgaccatttttatcagtcaaagctacccagcgtgtatccgtacgatgaccgttttcttgtggacgaacataatctacatacatgaaatcagcagtagtcttgtaacgtcctaccatacttcctgcattacggtcaatgtaattttcttcgggaccacgcccaaagtattctactacattcagactttgcggtatacggaaacgcacaccaatacgaggtacttcgagctgatctttattctctttctttttaccgggagtataagtggcaagatgagtatcttcctgaacttcagtccgtatagcttcctgatcagttgcagtaaatttcacattcacatttattattccatccggatatattctataatccatcaagtattggttgccagccggtaaattatatactacactcagaactgcattttgtccttccatacttatggaagcattactaatattaaaattatgacttgaagttttccaaatcaacaaacgtttcggatttgtattcccataatcattatcattaggtgcccgccagaagttgggttgtactccaaatccccggtcaaaatactcagttccatccactttatatgaagtaaccagacctgaatcacgattaaactcaaaataaaccttagatgaagaaacaatcagattattaccttcttctttaaagttcaaggcaggtcccgcagctttatatgccgctttatcaactgttaccggaagtctgaattgttcatatgctatttcgtgtccaaccggtatcagaagttccggctgagtagtgactacactgaaatgcacaaaatactctactccagcttttccctgcacattcttcaccggaatagtaaattccttttctgcctgaggagcgacatccaataataacttcccttttttcagcaccataccattagcacgtaattcatattggatggtatactttctcaaattagtaaaataaaatcggttgaacactcgatacttaccggaagtcacatcaacaacactaaacatcacattctgatgcacatatttcacttccgccatggcaggatgcggtttgcggtcaggaccgacaagtccattacagcagaaattaccatcactcggcatatttacaccataatcgcccccatacgtccaatacttacgtccattctcatctgttctcaataatccctgatctacccagtcccatatatatccaccttgaagattaggatatttataaatctctttccattgatcccatagattaccatttgaatttcccattgcatgagaatactccgacggaaccaccggccgatcagaaccagtttcaccaatatacctcagccattctgcgctgggatattggggcacatacatatccgtattccattcccactgtgcacgttcataattcactggcctgttcatgagttccttatcctgtccttttatccataaatatgtctgatagaaattgtaaccattaccagcctcatttcccaaagaccagaatgtaacagaaggataattcttgttccgttcgtacatatttgcagtacgatacagatgtggcttcaaccattccggattattacccaatgatccacctttgcgcaaatcgtaatacattccatgtgattcaacattggcttcatcatatacatagagcccaaactcatcgcacaattcataaaaccgacggtcttgcggataatggcaaagacgaaccgtgttcaaattattacgtttcatcaattcaaagtccttgcgcatcaattcttccgttacataatgccctgtttcttcattatgctcatgaatattgacacctttcaacttcaaaggctgaccattgataagtaatacaacatacggtttcccatttttagcaatttgatcaatcgctttgatttcaatacgccgaaaaccaacattaaaaggaataatctccgtcacttcatttccttctttcaacgtaatcaacaacttatagagattaggagcttctgaagtccaggtttttactccaggcaaacttgcattaaaagtaaccgtttgagtttctgagctctttacctcacaatcacttacaccattaactgcaaccttaccggaaactttatctatcaattcataaaacacttgcatctttttaccggcaagagcatgattacgaacatcaacagccaacttgaaaatgccatccgtataactgtcatccaatgtagagatcaccctgaagtcttttacagctacttttggctgagaatagagaaacacatcgcgctcaattccactcagacgccaaaaatcctgacactccagataggagcccgtactccagcgaaaaatcttcaagaccaatgtattcttaccattccggagatatttatttatcaaaaactccgcaggatttttagaatcttcattatagccaacttcatttccattcagatacacataaaccccggatttagcgcccgcaatatgcaaatagatatctcgtgacatccagtcttccggcacagttatttcccgacgataaatacctacgggtatatcttccggcaattgtggcggttgcggattaagcgctttgaattcatatccgtgattcgtataaataggtgtaccgtatccttgcgcttcccaatttcccggaacctggatatcactccaaccattcatatcggctacagcctgaacagcatctcccggcaaactacgatgcgagtccgagtaatagaacttccatgttccattcagcaatttatagtatttactattctcatattccccgctaagtgcagactgacggctatcatacgtcataaaagctgtgcgcggttcttccctgttcaccgaaactgtctgtatatcctgccaatacggagttttaatagctttcacttcacctgccattaccgtaaataaagcacctaacagacatactgcaactaaacttattatattttttttcatactatcagattattaaatttcatcgcatacaaggtgaacacatttcagatatgtttcaaacgtgtcccaaatatagatattattttttttctccaaaactttcctgttgtaattctacttcacgcaattcatatttagaaatccttcttttcaatcgtaaaatttcctctttcattgaattaagttccaaatcgtctgtcccgtgaatttcaacttttttttcggtactgctccgaacctcagccgggttataaataaagcgcatcacaggcttcacagacttatattcaaactcacaaggagcaatagcatgtactccttctcccaatacttctgcccggatatttatctttcctgcatttgttgtcgcacgaatcaagacaggggcacttccccaatgggccggtacaggattgcatgcaatatcgcaatcccctaacaatgtagcctcacccgtaaccgtaaaacgtacagaagtattattcagtctctttaccgtaccttcctcatccacaatctctgctattaccgtaacaacatctgaaccatcagcacgcaaaggcaaaccatcatcatctacacgaaggcgcagactcactggccgccatgaaggatactttttattggttgctacaatcttaccgtttatcaacccttctgccaatatatatgcttcttttcgttttccagaacgagccaaagccttcaattccataaaatgaaaagcatcttcgaaagtaattataggagaaggcattttgcacttatcggtagaacgttggtaaacgtattttttaccattctcaaaaacagtcaaacgcacttcttcacaattagaataaactgtaacgtcttcgggtgagaaaggtgtcatctcgttcgctatataaaccataggaccactctctgccggaagtttgtccaatttgtcaaaaggcctctgtgccatgaacatataataagacattttgggctggcgaaaagcatccattattccaccatagaacggttgaggatgatatccgcgttgatgatcaaaggcatgccacaaagttccacctacatgtgcaagttgcgaagcgtagagtgtctctaagcacgtataaggataagcgggagaagcataatgtacagcttgttgtaacataggactttctccccacgaacgatgtaccctactgtttgaattatgggaattccaatcatctacattatccccgaactcccgagtaaagtacatgatttcttctttcaatgtaccggcattataaaccgatttcttaccaccggacacagatgtaggatgagtgtaaatcacaggaaaacaatcacttcccaatgatcccggatcacaggcagaaagagcttgttcatacgggtattcttcatcgacagttttcttcgcattatgagcatattcctcagggaaatgcgtttcattcaaaaccggttcccatataaaagtagaaggatgattacgatcacgacgtaccaaaccacgaatatctgagtaggctctttctgaaaaaaccggttcatcattccagaattgccatccggcaacagccaatactgttaaaataccgaattcgtcacaggcatccagaaaagcaggatcatgaggatactgagtacaacgtatgatacgtactcctgcatcacgcaatttttttgcatcacgccaatgtaatgaattaggcaacgcgttaccgataatggcaaattcctgatgacgattaactcctatcagcttatcccgataaggtttattattcaggtacagaccatctctccctctgtattctattttgcgaattcctactttctgtaacattccatcaatgaggataccattcccatctaccagcttaatctctaactgatgcaaaataggagaatcaggtgtccaaagcttcggacactccacatacagattcacatcataataatttgccttgtcctttcgtagcgagagatttcttactcctctgcttatctctttgcccgagatatcccgtaacgtcagcataagttttcctttaaacaaacctgacgactcattacgcaaatgaattttcacacctatttcagctttatcttccgaaacaaaagggtaatggataaaaacaccgccccctgcaatttcatcttcataattagcatccgtaatatgtacttgattatgagctatcaagaagcaatccctataaattcctccaaaataagtaaagtccaaagcttgctggggtttaccaggcagaaatgagggatcatcactattatccgcacatatgctcaatgtattctccatttcaaaatttagatcttccgttacatctgctatgattggcaaataaccattgaaatgttctttaagtaactttccgttaagccagatccgagatttacccattataccttcaaagtgcagatatactttcttatctttcagatttgcaggtacagaaaagttttttcggtaccacgcccttccctgataattaatgttaccacttgcttcttcaggaagcaactcgagaccatgcggtatactcacaacttcccatgaagaatcgtcaaactctctctgccatgcatccggacaacttcctttataaaatcgccatcctacattcatattatatacttcacgaccactgttagcaagttcataaaaacctgccgtcgaaaaatgtgattcgctggcctgtatacctgaagtaaaaatcaccaataaaaaaaatattattacacacatcagtctataaattctggttacttactcttttctatctctaaaattctctgaaaagcctttatcgtctccagctatctatcgccagctagactatttttgcttcttactataccttaataatgcctccagataataataatcagcatatactaaaggaacatctatctcacttccatgaggaatgctccctacactatgcatcaagataaaattacagttcgtccctggctctgccaaatagagcggagaagacaaactcttcaatatatgttcagctgcctgttcatacttttctccatcatccacataatccgtcaattccagaaaagcagaagctgcaattgccgccgctgaagcatcacgtggcacttctttaaacatctgagggtcataattccaatccggaacaaatccctcctgccccgcattgaaatcccaatatggtaccccgtcttccggcagatttggatgattcagccagaagtcggctgtatggatcgccatatccaagaaatcctttctttttgtttcacgataagccatcgtatagccgtaaatagcccatgcctgtccacgtgcccaagcagagttatccgaaaatccctgacatgtagctttatgaagtacttttcccgtctcttcgtcataattcactacgtgataattactgtaatctgcacggaactgattcttcgcagtagtttccgcatgtgcattagcgatatttgcataaacagaatctcctgttactttcgtagcaaaatacagaagttccagattcatcatattatcaatgattacaggataaaaccattcatctattccgttccacgcttttcggtaattccatgactctatacaacccgttttttgattaaagcgtgtacatagtgaacgggctgactctaccagaatatctttataggtttcgttaccggtcaaacgatatgcattaccaaagctacagtacatcagaaaaccgatatcatgatggtttgtcagttttttcaatggttcgagagcttcagtccattttattgcagactctttccagttttcattgtgattatgttcatatacataccacagacatcccggatagaacccttcggtccaatcattctttttcgtagttttcaatttcccgtcttttatggtacgcggatactcattaggttccggtaccactttcaactgagcagaaagttgcagttcagctctctcaaaaccacgagacacaatatcttcctcattttttgtgctgcacgaacaaagaataagcaaacacaatatccaaagtttatttattttcatccttaatcctttttacctaaatacttattattatgtctatagcccatagtggataattagtagaaaggccgttctgactttttaatgtaacaacggccttcctttgtttatatttaccacatttgctaatcccaacccggattctgcttcaatttgtcattcttgaaaagttccgtattggcaatcggataaaagtataacttatcatcgaccaaacgtgtatccaacaattgccttgtataatttatacctgattcttccttcgttatcttcactccataaatatcttttaaggcgtccagctctttccagcgacgaagatcccaaaagcgatgtccctcaaaggcaagttcaactctacgttcattcttcagacgtttcaggaaaactgcaggggataaagtttcggacaatgcgggcatctttaccccatctctgccgcgaacttgatttacagcttgtaatgcggacatgccacatttttcatttgtaaatgtaatgtcatcataagcattgaccatagcttcagcatagtttagcaatacttctgcatatctgaataatatccagttgtgatgagcttttgtagttggtgcacctgcctcaaaacttatactactgttgacatacttgcgcaagtagtaccctgtcgtcgtagcattagtcaatggcagcccgttgcttcctccttcccatatttccacttccttatctgccggccacttcatactgttatgaacgatggtcagataaaaacgaggatctctctgagcataaggattctcacgcatagcttcattagtccaatcaaaaggctcaccgttattcatttcaaatgcgcttgccagattttccgtcggacaagtagacgttttcccacctgtcactcccataggaaagttagaagcctcaaaaccattattctctccgttaggacgtgcccaaataacctcttgacttctattattctgtgttccgaacagatttgcaaaattcttatccaaagtataccccaaagcagattggttaccaatgatctcataggcagcttctgcggcagcaatccatttacttttatcgttatccggattgaacaaaggacttgcagcatacagtgcggcacgagctttcaacgccagggcgactcccttcgtcacacgtccggtctcctgctcttttccaaagttcgtataactcaccggaagcagttgcgccatttccgtacattcggaaattataaaatctaagatcacaccggctgccacaggctcagcattattcgcctcttctttagtaacaacttttgttattaaaggaatattcttatagcgcttcaccaactcaaaatagaaaaatgcccgcaagaaacgaatctcatactcataattcggatattctttcatccaatcttcatactcgtctccatacttccagtcttcaaaagtcagtcctaccatattttccaaatagaaattagcgtcgtgaatccctgaatagtagttagagaatttgtcatcaatcgtagtattggcagaccaagttccattaacaaatctctgcacgtttgatgttttgtaaacatgtatggcatcatctgtagctgcatcttgcattgcaccgtcaatactgcaaaagtcttgaggcaaatagctatagacattcgttacaaactgcttgacgcgtgcataactcccttgaatctgttctttcgaataataatccgattcgttacaatccataaaatcacaggctgcaaataagaacagtgatagaaatattattaaatacttatttattggcttcatattattccacttttttagaaagataaattaaatccaaatgcatattgagtcatagtaggatgtgatgcaccaatagcctctggatcacgaatgtcaatcccgtcaatacagaacaaatcatgcgcacgggcaaagattttagctccacccagaaaaccggttttcttcaatagcttttccggaagcctgtaatacatttccaatgtcctcaacttcaagaaggacgcatcagccacccacaatgaattattgttgtagttattatctgatcctgaataagtcagacgcgggagggtaccgtttggattcgtttcactccaacgattttcgtaataataagtagagatcgtattattgcctactataggccgataaatacttcttgtatccaataacttgctgtaattacctgttccctggaacaaagcatagacaccccaacctttatattccgctcctagatcaaaagaataatatatttcgggacatgtagagttatatcccaatgctacctggtcataagcatctatccggttatctccgttttgatccttaaacatcagatctccaggacgcacatcgcccagatattgcttaacctcacgattatcgatttcttcctgagactgataaatacccatcacttcataaccgaaaatctgatttaaagaacctcctgtacgcttttgataatcataggggcgatactcttcattttgatttacaattttattgcgtacaaatgaaaactgcccacccaggtggtatgtgaagtttgatattttatcgtcccagttcaaagctatttcaatacccttattgtcaacaaccccgtcattggcattcggtaccgacatacccaatatacctgagactgcatttccgccagcaacaaggatgtctgtacgatgatcatagaaagcatcaacagccaatgacaatttattccatgccttgaaatcaaccccgacattcagcttatgagatttttcatatgtaagtccctcaactcctaattgagtcaacttcatgccactcatagaagtaggagtattcttaaaaaagtatgagcctccgctgccatagatatcctgaaataagttcacagcgtaatcagcacgtccggaaacaccatacgaagctcttaatttcaagaaattcagccagtcgttcttcaggaaactttcttctgaaagaatccagccggcaccaatagccgggaatattccccaacgatcatcgggatccaatatactggatgcagaaccggacaatgacaaatccactaaatagcgattattatatgcgtaatgtgcctgacctattacatccatgaaagcccgtcctgtattgcgtccctttgactttatcttatccatggagtacatgaaggtagcattcaaatcatgcttaccccactgtctggacaggttagcataagcctcaaagttgaagtgagtggtaacagaacctacacttttagaataagagagtgtaccttcattggcatgagtattaaattctttctcccctgtctccaaattcaaaaccgccgattcgtaaccaaaattcttcgtattgctatcccaataggcagcagtgttgtccaaagcaactttaataccaccggttaaacccggtaatagagctgccagatcctgtttcaaatgtatatcggcaaacaaggcacgagtctgagaacgcgcatatcctttacccgaaatattagcaaccggattattgccataggtcgtagtacctccccaaatacctctttccgtcttaatgggaaacgcagcggcaggaacctgatataaggctgtaaaaatatcactaacccctgttcccggacgattatgttcagagaagttgcccaataagttcaattgtacagttgtagtaggtgaagccgcaatatctaaatttgtacgaacattcagcttggaatacttaagttgagtagagtagccatcgttatctccggtaggctgcaagattccacggttatccagaaagtttaacatcgtatagtagcttacaaacttaccgccgccacgtgccgaaaaggttatattatcaccataactggctcctctcagtgtctcgtctacccaatctacattaggataaaacaacggattggtctggtttttaaaagcatccagttctgccaccgaatagcgtggcatcaaaccatcgttcttcattgcctcattcaacgcagatgcataagtatatccatctacaaaatcgggtaaacgcttcggagtagccatattgaactcataagaaaaattaatctgaggagaagtcagactacctcgtttcgttttaaccagaattacaccattagcaccacgaataccgtataagctggtagctaccgcatctttcagtacactgaccgattctatttcttctgaactcaattccttaagagagcgttcgaaaccatcgaccaatataagcgggcttttggaattcaaagtccccattccacgcacatacaaagtggctccgtcttcccaaaccgcaccggcattttgcaacacctgcaatcccggaagcataccaaacaattgattcgtagcattaatgctattcttatgcgaaagtttatcgctggtagccgtagaaacggcaccggtaacctctcttgcatcatgagtaatattgcggccgtaatctatcaccactttatccttatgaatcgtcaatgtgtctacttgtgccatcaggttgaatgaacacagcacacttgccaatatgatatttatctttttattcatactcttttttatctatgtttttcagatgtattattcccaaccggggttttgtaccaacccatatcctttatttatttcattctgggggaaagcactcagataccatttctccgaaaatccaccgggattccaccaagaacgactttgttctcctcccagaagtggaaactcttcacaaatataactgccgtcattcttgtttttatagatattcaatccatgcaaaggagtagagaatttttctttcatcttccaacggattaaatcgaaaaagcgtacttcttcataaccaaattcgcaagcacgctcacgaagaagctcttttctgaattcttccttactcaatcctttcttcaatcctttcataccgacacgagcacgtactttatcgacataatgataagccagctcattcggcccattattgtactcattcaaagcttccgcataactcaaatatatttctgcaatacgcagatgaggccactgaataatatgaccattatattcccctgcacggtccaatccccattttctgcaagataatcctgttaataaagacttagcagtcacttgtcctacattccagtctcttcctgccggatagttttccttatcatcaggcttttcttgtgtaacaccagccgttctgttctggaaaagatctccgtccaatatgaatgtttcagataaacgagggtctctgttcatgaatggattctttgtatgttccggattactccaatcaaaattctctccatcggcagtcggaaacatatcaaaatattcttttgtcgggcagattgctccccagcgaatagactggttggtatagggctgctgattggccttataataattctctctacggacagatattaaggtttcggtagtaccacgatcaaaataagctgcacggaaggcatagcggtatccactgggattaacatcttctttttcgaccaatttatagaaaccattgctgtcaacagctttaaagaaagcttcacaagcatccattgcatgtttccaacgttcacggtcatagttgccgaaccaagtcatcagcgcttcggaagcagctccctgaaagtaaggctcatcattattaaacagcggactggcgacaaaaagtaatactcttgctttcaaccccattgcaccggcttttgtcaaacgtccgtcccaattagacatctccgcttctgatatatgccaagggaactccggacaatcaatagcttcgttcaacagtcttactataaaatcgactgtctgctgcaaagtggcccgggtaggcatcgatgcttcatcgggtgaaatgactttatctataatgggcaaaccaccgtaatgacgcaacatgtgcgcataatatacagctaccatcgccttagcttccgctttcaaacgttctttctctgccctatccatatcgggcactctgtctatgttggctacaatcagccaggcgttgcgaatagccgaccacatatgggtttcattctcattgaaacgaatcttggtagccatgtaggtgcctcttggtgaattttccgtaccggcattataattaccggcataataaaccttattaacgcccgaataccccagataatcctgattcaaatccgtcaggccttcaatatttcccagccacatcgtattccaataactattcgatgtttccagtcccatcggcaaatatcgataactgtaccacagaactctgcgagcatactcagccgtagaaaagaccgtgtcaatcgtaacatccgtactggggggcttttgcaagaatttatctccgaaagctaaatcctcgcatgcgttggtggaaatcagcaatcccaacaacagcacaatagcatgaaaatgtttctttatatttttcatatcatttcttttatttaagcgttaaaatccaacctttaatccaaagtttataactttcaccaacggataggtatctccactgggattactttcggggtcactgaaacccaatgcatcaaatgtcaataagttataaccggaaagagaaatgcgtaaagaactcagatgcatcttactcaaaagaccttgagggaaagaatatcccacttccagattcttcagacgaacataggaagcgtcacgcaaccataaatcagaatctttataattgttcggtttactgtttgtcaacgaaatagccggcgcctttgcggaatttcctttttccggcgtccaggcatcatcgatcatatacttcagcaaagagcgattattggtacttccaaacggataacgataaaagtctgcaaccagacgggaagttttgaatgcgcccgcccacgtcatactgaaatccaaacctttccaggagaagcccattgacaaattacctgtaagcaatggataaataggattaccaatagccgaaacatcattattgtcaatcttatgatctccgttcagatccttatatttcacatcaccggccaaaggagtaaatccctcaccatgatccggaatgccaccttcttttcctttcagcgaagcataattggcagcctcttcttcggtaaagaaaccatcgtacatatatccgaactgttgcccgacaggacgacctgtccgacgcatccattcataaggctgaggaatttcatcgttgaacacaatctcattcttggcatatccccaattggttccaatatgatatcttacattctgaatctggtcttcccagcgagccgtcacttcgaaacctttattattaactttacccatatttacgataggcaaacttacggcgagatagcctggattgatattacgggagatcagaatgtctttacggtgttcaatgaagtaatcgaaagacgttttcaggcgactgtcaaaaaagtgtagatcaataccataattctgtttggccgctgtttcccaagttacgttcggattaccaattctcgattctttcgctccagccaatacattattgacaattgaaccaaaaccgtatttttcagtactgattgtatatgcatcgggaagatacaggaatctggaaccatcagatacaatatcattacccacaataccatacgagccacgtagtttcagataactgatatatggttttaaagatttcatgaaaggttcttccgaaattatccatccgatggatccggcagggaagaaaccaaaacgactgccttccgcaaaattctcagaaccgttatatccaatgctgaaatctgccagatagcgggttttatagtcataagtagcgcgtcctacgagacctacataactacgtggaataccgggaaacgacttatcagaatagtaatatttcatattttgattatacataaacaaagcagacacgttatgagagccgaacttcctctgataattcacggcagcttctaaataccagtcgcgggattgaccgtatttttcatcactatatcccagcgtttgcatctcctggtttttcttcagcaagacttcatctccttctcccagaaaagcttcataacgatctgcacgcccttcacgacgcttagttatactcacaccactattataagcacctttcacgtgagctttcaatccttttgtaagaaagtcaagcttctgatcaagtacaaagtcaaagttcactacattattatcatacgtattgaaaccttttccataataggagttcaatgcatcatatacagtaccgaattttccaaatgtttgtgcatttaccgtaacccactttccatctacaatacccggtcctgcaaaaggaggtgtccaatatatatccctgaacaagcttttaacatttgtagctgtaccgttattatagttaggttcacgtttgtcagtcaggcgccctcccagattgattttcatggaagtagttttggttacatccacatccatgttcacacggtagttgtaacggttatatttaaaacctgtcttatgtccgtgcgtatcgaaggttttaaaaagtccgtcttgagtaaatacacccagcgaggcaaaatagcgaacacgctttgagccacctgaaatattaaagttatgttgggtctgtactgctgtctttcttatcagcatatcagtccagtcagtatctgaataaatcaacggattactatgggtgcggaatgcttccagcatttccggtgaaaacgccaggttttcttctgccactccatcacgcaactgagcattattgtaagttgttgcataatcataactattggcaaactccggtatacgggtaggcaactgaagtgccatactggtggaaaaactgattttagctttgccttcctgtccgcgcttagtagtaaccagaacgacaccattggcaccacgcacaccaaacacggcagttgccgaagcgtctttcaataccgtgatgtcttcaatttcgttcgggtccaactggtaaaacgaacgctctaccccatctaccagcatcaaaggggcagatagtccttctgtcaacgaccccacaccacgtacatagatcgtagcgtcatctgcacctggttgtccactggattgtacactggataatccggggatttttccactcaaggcattagcaatactgcctacaggagatttcatgatttcatctgatttcatcgaagaaagtgctcctgtgactgttactttcttagtagtaccgtaagcgataacctgcacttcttccagagtagtgacattttctgttagcgtgattttcaactccggctctcctttataaacaacctctttgtcctcgtaacctataaatgaaactacaatagtagctccgaccggaactgtcaatgaaaattctccatccagattagttgccataccattctgggtccctttcacaaatacagtagcaccaataaccggacccatatcgtccagcacaacacctttcactacttttgttttagcttgctgtgtaatagctgttgaccgggaatgattttcatccccccaagccctgcctgagtgcacgaccaataaagccaacgcaagtaaccatactttgtttctcataaaatagattttgattgatattaattaactctgtgcttacgatgaaaagagttcaataagcacagtgcaaactaagtctaattccctcacatgcactttccctgcatatatgatacatgtgcactaattgtatatcggacaatctgtgctacactacggacatttttacccctggcacttctacgaaattagcacaataagccactttccttgcctgaagaaatcataagagcgaaaggagttgtaatacgggataccttccataactctacagggggaatgccgtaaccccacaggggaacgctcgttacacgccgaggtaaaagccgttacataccgaggtaaagaccattacaataggcggtaaaggccgttacatactgaagtaaatgcttttacatcctcaagtaaacggcaggtaaatataagacattgattattagcctatttattaattctacttcgattccgcctcgttagaggtttccttccgataagataatggagacactccataaaagtccttgaagcaacgactgaaataccggggagaagcaaatcccagttgataggaaatctccgatatattatattgaggtgcttcctgcaacattcgcaatgcctcttccaatttcagttttagggtaaattcattaggagtaagtccaaccacctcctttaggcgggtaaacatcttactacgccccatattcagttcggcagccagcatgttcatgtcaaagtccggattatcaaagttacgccttataacggttgttgccttatccagcagttcctggtccattacattcaagattccggtttccggggtagtcatcttttctgtttgagctatcttaccgagcagtttctttctgtttttcaacagattgccgcaacgggtcaagagcaatttcacattaaacggtttcgttatataatcatccgctccaaacatgtatccttctatcgtgcagtcttccgaagtctgagccgtgagtaataccactggcatatatgccaattccaggcagttctttatcttatagcacatttccttaccagacatcactggcatcatcacgtcactgaccacaatatccggatgccactgttgcgccatttcaaagcccacctgtccattggtagccttatacaccgtgtatgtgggcgaaaagatgttcaccagcatttccaacacctcttcatcatcttccacaagcagcacgcgaggcattcctgtcttatcttccgcaatttccggctcatctttttccatcgcatcattcagcaatgctatttcatccataagcatgttcctatgatcagagtaagacttcacaactttttcatactccagttcctcttgcgtaaactgtacatttccaatgggcaggtatatcctgaaaacactaccctctcccaatgtactgtccactttaatctctcctttatgggcatctactatccctttaatcaatgccaacccgatgccactccccaacagcccttttctggagtattcgtctcctacctgataaaagcgctcgaatatcttctgctggacatcccggggaattccacaaccgctgtcagctaccgctatttcaatcatccgctgctgtctcctgacagtaacctttatatcctttccttccggtgtatacttaaaagcattcgacagtaaattaaagatcaccttctgcatctgcaccggatcaaaccacaaatccacttcctcttccacatgctcgaatgtatattccatattcctcttgcgggcaaagtcgacaaacagctgataaatgtccttcacgaaagaaattacatctacgcgctccactttcaacttcatgaatccctgttcctgcttcctgaagtccagcaattccgttatcaggaggcgcaaatttaccgcatttttatgtattcctcgcaaacgcttgtttacgacaggagccagtttctccatttgcaacaacatctctacctgccctattattaaagtcaacggagtgcggaactcatgtgatatgttcgtaaagaaacgcagtttcattttgttcacttcttctatacgctctttctcgttcttttcttctgccaaagataatgccaacatcctgcgagccatctttaccctccagaaactataaacaatgctcgcaaccacaagaaaatataccagaaatgcccaaaccgtggcaaaccaaggactgtgtatcgtgatgccaagcattatttccttaggctccccattttccactttatttccaaaatcacggactttcaatatataattgcccggagccaggtttgtgtaattcactcttaactggttcgtcagtacccaatcttcatcaaaaccttccagtttatactggtattcatcttttccttccaactccacataattggaattggaaaaattaatcattatattgttctgttccgaagataaatctaagtgccttgtaaatgccagtgcctgggataatactcccgacccgtcatcgggagaaaccttcatgttattgacataaagaccggaaaaatagaattcagacgacctactttcactcgcctgatacaagtctttctctctgaatgcaatcagcccgtctacccctcctatataaatcaggtcatcatcagccattaaaatgccaccgccttcagctactgccgaaatgcctcctttaagtcccaattctatagaatgaatggagtcactaaaaggagaataaatggaaaagccttcatcgccggttatcagtatattgttcatgtgcgtttctgccaggttatagcaaaaatcactcagcaaatggctgctttcttttgtataatgttcccagtttcccgtatcatgattataagaatatacaccgtcccccaaagtagctacataaaccgttccatcagaagcctccatgatgcgagttattcgggcattagtaatagcactccctttcagttcgatacattccaactggttccagtcacctatttttatcctgtaaagtttaaaatccgcagccaaccagacgtatcctcgcgagtcaatctcaaacgtcaaaaaaagagacctcttactgagcaactgaaattcattcttctccggatcaattctccaaaagccattacgagcagttacatacaaccatccatctttaaatatagagtgataaataatatggtttggaccctctcccgtccgcttgtaatggtccaaataatgataaaaacggtcctgctttctgctatatcggcttattccaccagtatatgtgcctatatatacctggtcattttttttatcataactaatcgtttttatgttattatggtaaatagagttcttcccggaagacgtgtaataagtaaagattccactcgccctatgcagcctattcacacctcccccatctgtgccaatccacaaattatggtctttatcttcgaccatctgccccacaataggaaagtttaagcaatgattgttagtgttgtcataaggataatatagaaatacatccttcgactgattgaaataattaacgccaccgtaataagtgcccacccatatagtaccttgcctgtctttataaagagagaaaacagattgatgttccaaagatcccggatgataatctggacgatagacacgatatgtatccgcataaggattataaacctgcaatccctcaaaagtcccaaaccagacattctgccattcatcttccacaaaccctcttatctgttgacttacaacacgttccggagagtattcttccttcgtgatcttcccatctctgcccaccttatacaacccttgcatacgcgaagcaatccatagctctttccggctactcacaaacaatttgtatatctcaatatcaggaagtacacattttacttcttccccctccattacatatagcccacttgccgtccctatccagatcttcctgtccgacatttccatacacatgacagaagccacatccaactttcggtaaaagcataatgagtccgtatcggtatcatacctgaataaagtgtcgcgcacagtgcaccatatctctccatctaaggccgccagagccccgacaccaaccggaaccaactccttaaacctttccttgcgaatgtcatatttaattagagctccgctattcaacatcagaatatcaccatttgaatcgcctataatctggttaaccactccgttgatgaggttctttcttcgatgttgataatctatgatatcataagatttatatttggaaatctgtttactatcgtaaacattcactccttcatttgtgccaaaccacatacgtcctaaagtatcctgatagatagccaataccgaagggctggaaagtccgtccttcattgtcagttttttaaagtattgcccgtaaaatttggcaggcgacagcattagaaaaagtaacaatatgtatttaagtcggttcatagtaatgtaattctcaaggttatataatataaacacagattgtgtttgcaaaaatatctaaaagagttcaaattccaatagactcttccattctatttgtgcctcaacatgtcaaatccgtccgtttttacagcacatattgtccatctacctctatatggaaaatactgtccgaaagtagttcaaaaaacatatatctttgctccagtctcaaatatacgtaaagcgaaaagaagattatgaaaagatacttattcttagcactattgattctacccgctttaaatgtatcaaataaagaattcaataggaagattaacaaatcaattattttactaacattatgaagaaacattatccggcaataaatatcgtgaagtactcacctaaaaaaagtaaaaatgaaacgtttaattatctattccatcctgtccgttgtaaccttgtgttcctatggacaaagtaattttaataagacggaaataaaatctatcatgaaacgtgtggcggactggcaaatagccaatccggcaacaggtgcggaacatgacgacctgaactggacctatgccgcactgtacatgggaatgatagactgggccgaattgaccgaaaaagaagatggtgacagccaatattacaattggctcctgaaaataggccggcggaatgcctggcaaatgggaaaatacatgtatcatgcagacttcatcgccgtaggacaagtcttcctggaaatgtatcagaaatacaacgaccgcaatatgatgtttcccaccctggcacgcaccgaattcgtcatcaaccatccttcggccagcacgctggaactggattatagaaatatggcaagcctggaacgctggtcatggtgtgacgccctgttcatggctcctcccgtatatgccaaaatgtatatgctgacgaatgactggaaatatattgaattcatgaatcgggaatacaaggcaacctacgattacctttttgacaaagaagaagagcttttctacagagatcaccgctactttaagcagaaagaggccaatggcaagaaagttttctggggacgcggtaatggctgggtattaggtggactttgtgaaatcctccagacactaccccgaaataacatgcaccgccaattctaccaggatctcttcatcaccctgtccaaccgtatcgtccggttgcagggcaaggacggatattggcatgcaagtctgctggacccagactcttatccttcacccgaaacaagtgccactggcttcattgtctatgcactggcctatggtgtcaatgaaggattgctggataaaaccgtcatgatgcccgccattgagaaaggttggaaagccctcgtcaaagctgtggagaaagacggcaagctgggctatgtacaacccattggggcagatcccaagaaagtgactcgtgaaatgacggaggtctatggcgcaggagcgttcctgttggccggcaaccagatttataaaatggttccataaaaacttaaataatacattaaactgaaaataatatgaagatcactatccggcttatagcattagttatcataggcagtctgatgtcgacaggagtatctgctcagaacatcccgaacgctgataacgagtatgaagcgttaatgcagaaaatcaggcttgacttcgccaaaaatccttccattgataaagatttaaagacctacaatgaggtggacggttcattcacagatgtggattacgccagtattgaacgaaccaactggccaccaatgaaacatattgaccgtctctccgactttgctttcgcctataccaatccccaaaacaagtattataaagacgaaaacctgtttgccaaaatacaaaaaggtctggagtactggcacgaacgcaacccgtggtgccacaattggtggtacaatcaaatagcggaacctcaacgtctaggcatattactgatacaaatgcgtacaggcgagaaacagctcccgacagaacttgagaagaagattttggaacgaatagagaaggacggtgggcatcctgccaaatggaccggcgccaaccgtaccgacattgcactacactggatctaccgggcatgtctttctgaaaatgaaaccgacctgaaaattgcactcgaaaacgcatacagtcctgtagtatataccaccaaagaaggttttcagcacgacaacagctattttcagcacggtgcacaactctatatcggtggatatggagacgaaattctgaaaggtgtcacccaaatagccatgtataccaaaggtacccaatatgcaattcctcaagataaactggcattactgagcaagttcatgcgtgaaacttattatgccaccatgcgcggacaatacatgctattcgatgtattgggaagaggtgtaagtcgtcctgaagtcactaaaaagtctcatacagccttgttcgccaaacgcatgattgaacttgatccagctcacatcaatgaatacaaagatatcatctcgcgcctaagtggaaagcatcctgccgactatgctttgtcacccaagcatacccactattttcgcggagattataccttgcatatacgtcctgcctacacttttgatgtccggatggtatctacacgcacagcccgttgcgaatatggcaatggagagaatctgaaaacttactttatgtccgacggatgcaccaacatagtaaccgaaggaaatgaatatgccaatatcttccctgtctggaactggactcgcatcccaggagtaacagctccgcaagttccccaaatacctttagcagccagcgactggcaaacactcggcacttctacttttgccggaggagtatccgacagcatttatggagcatctgtctattcatacactgattcatacgccgacattaataccagtgcacggaaagcatggtttttcttcgatgaggaggtagtatgtctgggggcaggcatccactctacatctcaatatcctgtgtatacaacggtaaaccagtgcttatccacttccgaaaaagcgataatacgccacaaaaataaacagactgaaatagtccgggggagtttcaactacacttctcccgagtggatccttcataataaaatagggtacttattccccaatggaggaaatgtattcgtagccaaccagcagcagacaggaagctggtatgatatcaatcatactgctcccaaagatagtgtgcagaaagatgccttcactatatgccttgaccacggcaaacagccatcagatgcaatttatgcttacattatcgttcctggcatgcagaccaccgatgaggtaaaaaagtatcagaagaaaaagaacattgaaattctatccaacacagaaaacctgcaagcagtcagaagtaataaatcagatatattgcaaatgatattttactgcgcaggagagttcacatacaaagatctaacagtaaaggcagataaggcctgtgcattaatggtaaaaataaagggtcagaatgaaatgaaacttcatatagcagatccgggacagacgcaatccaatataaccatagacattcggatgcgaaaacaatcaaaaacaatcaattgtgattaccggaacagtggcatttatgccggatctaccaaagcctttgatatcgtcctttaatcatatcacaatcaattggcctaacacaatatctaccttccccctaaagtctcaatcagttgaataatcaatcttgattgagacttttttcatctcacaaaaaagaagagtgtattaaaatttcttttaatacactctcatcttgaaagggaagttttcctttctatcaattctatcaatcaaatatcaaataaaatctaatgttatttgagacgatacagcaaccaggcactctggaaatctttacgattagagtatttagacttgaaagcgtcacgtgcgtcagctgcagaagctctgtcggcaaaagtgctcacaattacacgatacattgctgcatccggattaaaggcaatcacagcactataaccttccttatccagaaaatctttcaggctttcggcattagccttcacactaaagctaccacaaaccacactgtaatctttcaaaccacccacaccagaaattatgtccactttttcctgacgtacaccggcagttgcaacaggcacactttccacaacctttgcttcaaccggagcactcactaccggagaaacttctaccggttctgtaacctgaggttctgccagttcttgctgttttgctttttcatatgcttttttataagcgctttcactcgatttacaagaagagaatgccaatgcaatgcacaatcccattcctaaaaatgctaattttttcataatcatattgtttttgttagtaatttctacaatctatctatactcaatatctgcggaatatataacgaactccttcatattccagatgaagggatgaagaagtcaattcttccattgtaaatgtccgttctccattttcccaccccatatagaatgaatagttttcgtcttccatactttgaggcagcaaaataatagaaattttatctcctttcaaagaataatttccaaaaaacgtttgatagctaccatttttcaacaaacaaatggcagaaaagctacctttctggaaattataaaagatgctatcttgccgttcaattgaaccgtcggcatattgatattgcctcaactgccacttatcatccaaatcgccgtcaacattactacaagctgccagcacaagcactatcaacccgataatcagaaatatctttctctttcctatcttcatgtagctaatattccgaataataagacaaatgtacgtggaacaatcaatccaaagggcagcattatagttaaattaaattaatcacgtatcttttcctaacagacaaaaccaggttcgaaccgtacacgggcattacctgagccgtacccgctccgtatctatacgcttagagtagctacggacccgatacggagtagctacggacctaatacggagcagaacggagctagtgcggaacagatacggagccagtacatcccggacagccctcggattagtaccgagcccggaacagaaaaataaatatttcgaaaaaaaagaagttaagcgaacaacttactaaagaaatatgttaactttgtaatattaaccctcattaaaacagaaaggagaacattatgaaaggattaaatgtacttgtagctttcctgggcggcgcggcagtaggcgcagcagttggtatcttatttgctcccgaaaaaggagaagacacccgtcataaaattgcagagatactccgcaaaaaagggattcgtctgaatcgcagcgaaatggaaaacctggtggacgagatcgcagccgaaatcaaaggcgaaggagctgaataaaacaaaacctacaaaaaaaacagagccactatgatgtttgcagatgacagaagcattgaaaacctccagcaactattcgttgagtttaagaaatatctgaaactacagaaggagtatactaagctggaaataaccgaaaaactctcaatcctgctttccgccttggtcctcttgtcggtagtcatcattcttggcatggtggcactgttttatttgtcatttgcattagcttatatactagacccgcttgtaggcggacttatggtaagcttcagcatcatcgccggcttccaccttctactcgttttattagtaatcactttccgcaagaaactcatcatcaatccaatggtgaacttcattgccggactgttctttgagaatgataatgaaaaatgataccatcatgaacaatatgcctgactcctcttccatgactctggaaagtatcgcgctacgaaaaaaagaattacggaagaaattgcatgtacagaaagaaatcatgacggatacggcaagagaactgtttgcaccccttgcacccgctgccgacaagggcaacgccattatgcgcgctttcaacacgggcatggctgtcttcgacggactaatgcttggagtaaagatgatgagaaaggtcagaagcatgttcggagccagaagataaacaggcgccataaagcaaaaaaaaccgcgttcttccattgagggacgcggctctttttattgattcaattccaatgattacagatacgtttcgagcaacttcacgccaccgtcttccggaacaatcgtaacttcttgcgtaatcgcaggcagcaatatcgtttcacctgcacgcacagcaatctcattctggctgtcgtccgtgatacggcatgcgccttccacacaaataaaaatcacaaatgaatccaattcagaatagtcacatgtaatttcttctgtcatgtcatagagagaagtagtgaagtaaggactggcaaccaattccaccggttcgttcttcagatgatcatattctgtacggaagtcatcctgtacatcagcaaaattaatagcctcagtagcctgagtagtgtgcaactcgcgagatttaccctctttgtctttccgattgtaatcgaaaatacgataagtgatatccgaagtctgctgaatttcagcaacaaaagcaccggcaccaataccatgcacacgaccggcaggcacatagaacacatcccccggttttacatcgcacgtttgcagcacttcagcaaaggttccattataaactctttccttgtattctttcggagttatctgctcagaaaagccggaaatcagttttgcccccttatctgccgataccacataccacatttcattcttgccgaaagaattgtgacgttttctcgccaactcatctcccggatgtacctgaatggataaatccaacttggcatcaatgaattttatcaacaagggaaactttgtgccaaaacgagagtaattcgcttcaccgacaagttcatgacggtattttcccaccatctcagggagcgtaaggcctttgtcaggcccattagcgacgacagactcgttgtcttctacagccgagatttcccagctttcgcctactccggatagcgtttcattcaattgcttaaaagcaataatcttgtcgcctccccaaagcgtctgcttcagaataggctcaaatttcaaaggatacattcgtagtttttgttagagctttaaataaaaatgttacatttttttagattaacgcgacaaacttacaaaaaatatcaattcgcctcgtaaatgttaaacgctaaactttcctaaaatgttcttcacatttcaagataaacccttgggagtacggaagaatttctttttatttgcaagaaatttaattttataccatggatatgataaacaccgtgtcaacggaaagtaacttgtcgggtttgaacaaggaagactttcaaaaagatataaataacaagaagactgatttatttattcttaaaaatgctcagggaatggaagttgcagtaactaactacggatgcgctatcctttccattatggtccccgacaaaaacgggaagtatgctaacgtaattttggggcatgacagtatagaccatgtagtcaacagccccgaacctttcctcaacaccactatcggacgctacggaaaccgtatagccaaaggaaaattcactctttatggcgaagagcacaatctgacaatcaacaatggaccaaattctttgcacggtggccccacaggtttccacgccagagtgtgggatgcagtccaaccggatccgacgactgttgtattcaactatacatccgcagatggcgaagagggctttcccggtaatctggaagtagaaatgacctatcgtctggaagatgaaaccaatgcactggttattgaatatcgggctaccacagacaaggcaactgttgtcaacctcaccaaccacggcttcttcaatttggcaggtattgccaatcccacccctacggttctgaaccacatcattactatcaacgctgatcattatactcccattgacgaagtgtccattccgacaggagaaatcttgaaggtagaaggtactcctatggatttccgtacaccgcataccatcggtgaacgtattgatgataagttccagcaattggtgaatggtacaggttacgatcactgctacgtactgaataaaacagagagtggtgaattaagccttgccgctacttatacggaacccgaaagcggacgtacaatggaagtatataccacagagaatggtgtacaactctataccggaaactggctaggcggctttgcaggtgctcacggagctactttcccggcacgcagtgctgtttgctttgaagcacaatgtttccccgacacacccaacaaaccacatttcccatcggccgtattgctcccggacgatgaataccaacaagtaaccatttacaagtttggtgtacaagaatgaatataactaacctaattttataactaatttaattaattaaaaaccatgacacaacaaaaacagaacggtaatcttgtcgctattattaccatgttcttcatttttgcgatgatttccttcgttaccaatcttgccgcaccgttcggtacgatttggagaaacgaatatgcgggttcgaacactttaggtatgatgggaaatatgatgaacttcctggcatatctgtttatgggaattcctgccggtaacatgctcgttaagatcggttacaaaaagactgcattgattgcaatggcagtaggtttcctcggtttgttcacgcaatacctttccagtttattcggagcaaatgccgaagttttcgcattcggcgaatatgttatcaaattaaatttcgttatctatctgcttggtgcattcatctgcggtttctgtgtttgtatgcttaacacagtggtgaacccgatgctgaacctccttggtggtggtggtaacaaaggtaaccagttgatccaaacaggtggagcccttaattctttgtccggtacattgactcctcttttcgtaggtgctttgattggtacggtaacttccaagacagccatgtctgatgttgctcctctcctcttcgttgctatgggtgtattcgtagctgcatttattatcatttcatttgtagctatccctgagccacatcttcagaaaagtggagcaaagaaagaaaaattctctcatagtccatggagcttccgccacactgtattaggtgtagttggtatcttcatctatgtaggtatcgaaatcggtatcccgggtacactgaacttctatcttgccgacgcaagcgataagggtgccggaattatgatgaacggtgctgctatcggtggtgctattgctgccatctactggttgctgatgcttgtaggacgtactgcaagtagcgctatcagcggtaaagtttccagccgtacacagttaatcgttgtatctgctaccgctattgtttttgtattgattgctatcttcactccgaaagatgtaacagtttcaatgcccggttacactgtaggtgaaggatttatgatggcacaagtacctgtcagcgcattgttcctcgtactttgcggtctttgtacttctgtaatgtggggtggtatcttcaaccttgcagtagaaggattaggaaaatatacagcacaagcatccggtatcttcatgatgatggttgttggtggtggtgtattgccgttgatccaacaaagcatctctgactctgtaggttatatggccagctactggctgattatcgcagctcttgcttatctgctgttctacggcttggtaggttgcaaaaatgtaaataaagatatcccagtagaggattaacgcaattaaaaggtataggtaattaatttattcacttataaatttgaaaagattatggatatagaacacgtaagaagccgtttcatcaagcattttgacggaacaacaggagcagtttacgcttctccgggacgcatcaacctcattggtgagcatacagactataacggtggttttgtattccctggagcaatcgataaaggtatgatcgctgaaattaaaccgaatggtacagacattgtgaaagcttattccatcgatctgaaagattatgtggaattcggtttgaaggaagaagatgctccccgtgcaagctgggcaagatatatcttcggtgtatgccgtgagatgattaagcgtggcgttgatgtaaagggcttcgatacagctttctccggtgatgtgcctttaggtgcaggtatgtcttcatctgccgctttggagagtacatatgcgtatgcattgaacgatctgttcggtgacaacaagatagacaagttcgaactggctaaagtaggtcaggcaactgaacataactattgcggtgtaaactgtggtattatggaccagttcgcttccgtatttggcaagcaaggtagtcttatccgtctggactgccgctcactggaatatcaatactttccattcgatccgaaaggctatcgtctggtattggtagattctgtagttaaacatgaattggcttcttcagcatacaacaagcgtcgtcaaagctgcgaagctgccgttgctgctatccagaagaaacatccgcatgtagagttcctgcgcgattgtaccatggacatgctacaagagtcaaaagctgaaatcagcgaagaagactacatgcgtgcagaatacgtaatcgaagaaatccagcgcgtacttgatgtttgcgatgcactggaaaaaggtgattacgaaactgtaggtcagaagatgtacgaaacacatcatggtatgagcaagctttacgaagttagctgcgaagagctcgacttcctgaatgatcttgcattcgactgcggtgtaacaggttcacgcgtaatgggcggtggtttcggtggttgtactatcaacttggtgaaagatgagttgtatgatacattcatccagaatgcaaaggataagttcaaagagaaatttggcagaagccctaaaatttatgatgtagtcatcggtgacggtgctcgcagattagtttaaaataaaaacaactcaatcttaaaagggcgtcttcccatcacggggagacgcccttatctttttagcctttttcaaataaactaattaactaacctaatctaaccttcaatatattctaatatctaaacctattgtactccttctgttgtcatctgaatacgcttcatggttccatcttcattatagtacaggcgatcaatgcacacagagcgcctatagcttccccctgcgggattaattccgccattgtgatagacaaagtaccagtcgcctttaaattcgatgatggcctgatgattggtgttggagttaccggctatttcattcagtattcctttatattcccaaggtccggtaatactccggctcattgcatagcaaatcttctcgggaaactcagaagcgtaagaaagataataccagtctccgcgcttatgtatccagggagcttccgtaaaacgaggcaaatctacgtaaacaatcgggccatccagttcaatcatattcttcttcaatctggcataatagcactgggtatttccccaatacagataagcttgtccgtcatcgtctataaagactgtcgggtctatatcgtcccaatagattttagttcgctctgtggtcatatcattggtaattaaagcagagccacgggcatctataaaagggccgagcggtgaatcggcaacagccacaccgatagactttccgggaacatccttatgctccacagtgacataccaatagaacttaccatcgcgctcaatgacctgacttgcccatgcttcccccttcgcccaggagaaatcttttgctttcaagggtacaggatgttctgtccatgtcttcatgtcggatgaagaaaagacacaccagtcattcaggagataatgctcagccggtggcggacattcatcatgtccggcataaatatacaccttaccatcatgcaccatcgcaccaggatcagccgtatatttatatttgatgattggatttccattagcaacaaaagtggtatctttttgcgctgatagcccttgcgaggctaccagaacaaaagaaatcaaccaaaatctaaccttattaactctaaatctatccattagttttatccttttttgaaaatataaacagcaaatgtcttcggttccaactctacactcaacacttggctatcaattgataccgaagtttcctgaggctgaatagcagacggctgctcaatcgtattgtctttgtcaggatcagccgaacgaagcttgatgcaacatccaccggacagtacatcctgtttcttcaatccttcaaacttcaatgacaaaggctgggccctatcagaagtattggcgacctttactataatttcattcttattcttatcatagactgcacttgcaaacagtccgttctggccttcggcacctgttacaggcttcttgttcatcatcaaagaaagcacattagtgcccttgtgatgcccatagagttgctgcacatagtaacttacggtacggacagagttgagattatcaaaccaaatcatatccggacgccattgccagccttccacatgagcaaacaaaggagcataagtggccatgtgtacaatatccgcattgcgctccaatccggtcataaatgcggcttcaagcagagcggcattgaaatggttccatttcttacccttaccatgacaagcatattctcctgcaaacactttcggacctttacggtcatagttatcatagcgtgctccctcattcaggaaccagttttcgggacgatagaaatgttcatccaccaagtcaactttcagacgtttcatttccggccatagatattcgaactgttttccttcagagtccggaccggaacttccaataatcttgatatccggataggctttacgaatagccttgataaacggttcgaggtgctccggatattccggtccccactgctcattgcctataccaatgaatttcaggttgaacgatgcaggatgtcccatatcggcacgcagttttccccatttcgtggtcacatccccattggcaaattctatcagatcaagagcatcctgcacatagctatccaaatcgcaaacagccacgtgtgcctctgcatctgaattctgaaactgacaagccagaccgcaactcaatacaggaagcggctctgctcctatttcttccgaaagttggaagaactcaaaaaagcctaatccatagctctgaaaataatcgggatagaaacgatgcgggaaagtatattcccaacgattctcattcaggggacgattttctacagggcctactgattttttccaatcataacgcgtagccaaatctgttccttcaacgatacatccgccggggaaacggaaaacacccggtttgatatctgctaaagcttgcgcaagatctttacgcaaaccattctcatgtcctttccacgtatcgactggaaaaagggaaacgtgttccaaatcgactgttccccctgaagcaaggaaaatacgtaatgttgactttggatctgttatgctgggcttcagaataacatgatactttttccattctttcgaatcaatagtcaatgttgctgtagcgaaagcatgatgttcgcccatagattgggtatctaccaactctatacggattttttctgctgttcctccttgaggcaaacgtgcccatacggaaaagcgatactcttctccggcttttacaccgatgccaaagaatccttcattgtcaagtccggtgtgcttatgcgggtgtcccggatcagacaaacgaacataatgaggattcttctcaaaaggtccgtcatcctgcaaagtcacattaccaaaagttttccatcccatcaaattttgagggaattcaaacgaacggttcttcactaactcggcatatagtccgccatcagcggcatagttgatatcctcaaagaacaacccatacatagtaggctgaatctctgcacctaatttcttggtttgtatcacaaactcattggtttgtgcctgaagcgccatacccgcagtaagggtcagcgctgttaataatccagtgtatcttttcatggtttcaaaataaaaattataattgattacttagttctttttccccagacggaacgtccccggctatccagaccagtgaaaagaacggtttccgtttcattttcccaatcatgtccggcaaatactatcaagtcttttatatcttctccatcaaatgtcaaccgcagagattgctttacatctgcaaaatcccaggttcctttattctctcccagttttccatctttctccaaatgtagcagacgagacatgttccattcttcatcttgcagttcaccctcaccccacaatatttgtcccgcttctaactggcgttcatacaaaggttcctgcacacggataacctcccactcaccagccaaatctgctgcggagaacttccgggatttactaccagcataacgctcaggagatactacaggccaaccctcttccgtaaagaacacctgacgtatatgaagatccatcatttgattctgtggagacaaacgcccctgatgagccataaagtactgtccatcatctgaagtaaacaccgcgcaatgcgctgttccggcccaacccggatgatttttgaaacggtaaggcgccgttagtatcggaaagttattggtagtatctttcaattccttaccaaagtaatccataaaaggaccttctgctttatctgaacgtccgacacgcacattataagtcgtcatcagcggatcgtaggaaacaaataggaaatattcttttaattcaggattataaataatctcaggcgcttccagattatccttcttgtaattagcacgacgagctaccaagtgtcctctatctccttctgccaaaggaagtccggtttcaggattcagttccacgcagtacaaaccaccaaagaacgaaccgtagtgcatccaccacttcccatttgaagggtctacagtgatactgggatcaatggcattcatggctgtcgtatcatctgttttaacaacacagcctgccaatgtccaaggaccttcaggcgaatcagattcagctaatccgatataggatgtcttccgcccgaaagccgatacgcaataatacaatctatacttattgttataaggaataatataaggagcccatatatttgtcgccccatgtccatcagcatgggtacgcacccactctaccgcttcttgcggaatttcaggaaacgcccagccaaggaattcccaattcaccagatctttagaacgccgcatctgaataaaccccaaagggactcctttctctttagcttctttacggttttcacggaatattgcatctgtagaatacatatagtaatactcacccatcttccggcatgacggatcatgtacattataagttccccacgattgataattctccatagaagacagtgaagaataatcatccgtccacggattaggagaagagacaggcgtaaatacagaggaagtacaaccagcaaacaggctgctcatcaacacaacagctatacataataagtttctcatactatcagtagattataaattctattgcaaaaatacgcccggggtaagcatggtaaggtggacaaatgaacatttgaggtggacaattcagcaatttaaattaaaaacagctattctgattttaaacattataaatattcttctaactttgcctttaataatacaaattatatgaaaagacacaaccttttataccttattatatatatcagtttcattataccgtgtgctctgcaagcacaagagcgtttcaccgaccagtacaatgtctcatacatcaccatggatgatggactcccacataattttattgatgatatttataaagatacccggggatttctttggatttctacggccggaggagggctttcccgatatgatggttatgaattcattcatttcaatcccaatacctcccattgtaagctaaaaagtaactttatactaaatgtacatgaagatacctttcaacgcctttggattgtatctgaaggaggaactgacattattgatttattgactttgcaacctatcatcccgaatgatcccaaaggactgctaactaccttattaaaccaaccggcatatactataatgcgcgactcacagaattctatatggttgcaatgcggaaatgcacttcaccggattacctttaatataaagggagacgtggaaagcctgtctacattaacattgccgcaattaaacgaaccggatctcgtattaaaggatattgatgaagacgggaaaatatggactgcaataaatggtacaatctataaaatcattccgaataatcagggaggattagaagaaagccatatatcagagaaactaacgttcttacctgatacctatctgaaagatatgttggcaaaagaaaatgaggtatggatagccacgcatgcaggattgtaccgctataataaaaacagtaacgcaataaagatttacgaaaatattcctaatgacccacattccatttcgcaaaattatctgaccagtcttgctatcaccaacgataaacaattgattgcaggtacactccgtggtgcgaatatttataatccaattacagacagtttcgaacatctcgcccataattctactggcaacagcctattgaatagtaactttatcaattgtataaaagtagacggaaaacatatatggatcggcactgaaagcggaggaatcaacaaactcgcacctaaacgcttatctatacataactacatacatgataaagaaattccctcaagcctgtctgacaacccggtaaatgccatttatgaagataaagaaaaaaacttatgggtaggcactgtggaaggaggtttgaatttgaagagacaagggactgaacagtttctccattacagatgggaacgtggtgagataagccataattctgtcagtagccttgccagtgacaaccaaggtcggttatgggtaggtacttggggcggtggaatcaatattatgaatcccaaagcactgaatcgtccccttcaagtcatatatacacatcctgaaacaggatttccattattcttcatagcagtacttgtttatgaccctatcaataacggaatgtgggtaggtgccaatcgggggctctttttttacgatatggcaactcagaaattcatttccccctttgctaaccatatggcagaaaatgtacgtggttgcctcggtgccctcatcgataaagaagataaattatggataggcagtacagaaggagtatatattatagaccttcattcccactccgctaaatcagagaaaggagagttccagtaccgacatctcaattataagctggacaatcctcaatcaaagttaatagagaagattagttgcttctgtgaaacgacagatggaacactgtggctgggtagcaacggatatggtatttataaaagagttgttgatggccaaggcaaagaaaaattcatttcttataataccacccaagacctaatcaacaataatgtccggagcatgcaagaaggcatagacggcaatatctggataggaacaaataatggactttcctgttatcacccgacagagaaccgttttacgaattacacgaaacaagatgggctacccgatactcaattttactggaacgcctcatgtcattcgtcagacggaaccctctattttggtactgttgcaggactcacagccattgaaagcaattttccgcctagtataatccagccagccaatgtaagattcactaaactaagaatcgggaatcaagatattcttcccggtaacatatatctatcccaagatattgctgtcactcaggaaataaaatttcatgaaaaagaaaaatcattttctttggaattctcagccctaaattttgaaccggacaatacggccacatatagttatcgtcttctcggatttgaagataaatgggtacaagtacccggaaaccgacgatttgcaagttacacaaacctgcctccgggaacttataccctgcaagtaaaatatacgcccgacggagaagatggagcagagaacatcacacaactaaagatcattatccaaccctacttctataagaccacttggtttatcttattgcttataggtttcgctttattaatcacctggcaaatttatcaatggcgtatacggaacttcaagcaacaaagagaactgttgcatcgtacagtggaagaacgtacataccagctggaacaacaaaaacaactattggagaatcaaacggaagaactctccaggcaaaacaatacactaaaacaacaaaacgaaaaaatcacccggcagaaagctcaattaagccgtatggcacgcaaagttcaagagttggcattagataagattgccttctttactaatattacacatgaattccgtaccccgataaccttgattatcggccccatcgaacgtgctcttaaactgagttataatccgcaggtaatagaacaattaaactttgtagaacgtaactccaaatatttattatcccttgtcaatcagttaatggacttccgaaaggtagaatccggtaaactgaatatagtaaagactaaaggaaactttctgaattttataaactcattactcactccttttgaagtgtttgccggagagcggaatatcgcgatcaagcactttttccatatgaaagatcctgaaatccgttacgatgaggaagccatgcataaagtaattaccaatctgctaagcaatgctattaaattcactcccgataatggggaaatatccgtatatatagctacattaccgacaaaagaaagtaaggaagtactctacctctgcgtcagtgatagtggaacaggcattccggagcaagatatagagcagatattcaaccgcttctaccaatcaaagaaacaagtgaagtatcctgtatatggacaaaccggtactggcatagggttatatctctgtaaacgtatcgtactgatgcacgacggagatataagtgtccgcaataaccccggttccggctgctctttccgcatcttgcttccattacccaaggaagacataaacgatcagcttatcattgaaaataacattccacctacaacacccgcaacagcagacgacgagttacccaaagaaaaagtggctttgaatattctggttgtagaagacaatgctgacatgagaggatatatccgttctatcctccgcgattattataatgtactcgaagcttgtaacggtgcagaagccattgaaatactaaacaggcaatcgatagatttcattgtaagtgacctgatgatgccagtaatggatggcatagagctgtcacgtcgagtaaaagagacttttgcaaactcacacatccctttcctaatgcttactgccaagacatcacctgaagcccgtctggaaagctaccgtacaggagtagacgaatatcttctaaaaccttttgatgagactctcctattaacccgtattgaaaatattctggagaatcgtagacgctaccagagacaattcagggcgaatatggatgttgaagtactaaatatagaagaagaatcaggagacaagaagttcatcaaccaagtgatggaagtagtgaaagaacactataaaaacccctactttgaggtcagtgatttcagcgaagccgttggggtaagtaaaagtttgctaaacaagaagcttcaaaacctcatcggacagtctgccgggcaattcatccgtaactacagactgaacactgcccgggagctgattctcaaaaaccgggaaacaaaacagatgaatatcgctgaaatagcatatgaggtaggtttcaatgaccccaagtactttgcccgttgcttcagtaaacaattcaatatgaagcccagtgatctgatgaatgaagagggtaataactgaaaaattacgaaaacaacgtacagtagataaaatttatagtcactattttctgctaataatcaaccttttacaaaaagtaagtctcttgtctacaaggaattaactttctgtcaacaaaaagttaacttcttgttgacaaactcttaacttcttgcatacagaaacattgttattttcatgtttttttacaaggagaggtaactatgcccatttacggcattgatcgggtgattaaataatcattcataagagctctcttatatatcaactacaataataattgtagtttttacactcaaatactcgtttgtccacctctaatattcgtttgtccacccctaaaagcatgtttgggcgtacttttgcatcactacttaatgtatcagataagtagaataactaattgttaaaccaataatatctgtattatgaagacaagaaaatggccggccatatgcctggcaattcttacaatgtgtatggggtcttgtcaggattgggggcaaatggacccaatccctggaaatcaagttttacctaaacttgagctggttgccaatctgacattcgatgatgaagaattgaaccccgaagagattcagactttcgcctaccctgatggcgacattcctattttagttactgatgaagcattaggacaagtactggaactatccggtggctatgcacgcatctttaatccattaaataaggtgaaagtgcaagacggagtttcactcactttctggatgaaacaagctgtccctgaagaagatgaagatgcatccgcttttgaacaggatgtaactggtgctattttttcatttgaaaatgcaaattctactcaacgtatgttttttacagccaacggttggttaaactatgaaggtgtagatggtagttacgaagacaataatccagcggatgccaaaaccggattgatgagtgctggtgaatggcattatgtagcaatatctgttaagaataacggatattttgtgtatgtagacggattaaagaaaatagagaaaactgtctctgacttcgattgctcaaaaatcgttcagtttatggcgtccgtaccttatctatatataggatacggttcgaacaccgagaatcagaagtggcaactcgacgacctgtccgtttatcggaatacgataacaagcacagaaattgcagtgccgaagaaaggtggagacagcagtgttgaaggtggcgagctttatcccggccaagttttcttcagcgattttgaaagagaaaacgatggcacaactatttatggtaagggtaacttcactgatttcggaggtaattttggtcgcgtattccaaaatgtgagtggcgctcaacgctccaattatttaatactgcccgaagatgtcctttctcattcagcagaaaccaaagaattgagcatcggtgtatgggtgaatgctgccaatgcaggtgcttcttccgactatatgtgggccccactattttcagcctatgcctctggtcctgctacagataatggtactcccatgtttgtctgccaatatagaggtattctgcaagtgaactgcaatggttggtgtgactttacagatgcacaaaatacaaaccaggtcaatagagtctatcacgatgcaacagactggttagccgataaaggttggcactattatacagttacgctgactgagaccaatgccaaagtatactttgatggagtactaaaaaatgaatggaatgttagcggttccggtgacggaaatgtcattggcggcttattctccaacggaagtgatttaaaatatatctgtctgggaggtaaccaagcatggaattggggagataatgacgcaggattcatgttcgacgatattgccatttataataaagcgttgactaaagcagaaatcgataatatcattgcctataaaaaactaccgactccaacgtatttcaacgactttgaaaaaggtgtaggcaatgccacaatctacggtgcaggaactatcgaacgtcctggcggcgcatgggggaatgtattccagaatgtaggaggcgcactacgctccaattatttagtgttgcccgaagatgccctctctcatactgctgatacaaaacaattaactgtagccgtttgggtaaattctgaaaatgcagggacttctgctgattacatgtgggctccgttgtttatggcatacggttcaggaccagccactgataatggtgcaccgatgttggcctgccaatacagaggggtactgcaagttaactgtagtggttggtgcgactttacagatgcacagaatacagcaggtgccaatgtggcttatcatgatgctacagattggcttgccgataaagattggcatttgtacactgccgtgttcactgaaaccaacgctaaagtttacttcgacggtgtgctgaagaatgaatggaatgtttcaggctcaggtgacggaaatgttattgcaggtttgttctctaacggaagcgacttgaaatatatctgcctgggaggtaaccaagcatggaactggggagacaatgatccgggctttgctttcgaccacatttctatttacaacgtagctttaactcaggaacaaattaaagttctggttaatcgtaagaaataacctttattctaatataaattaacgcaatatgaaagaaaagaaacatcaaacaacaccaagattcaagtgtattggcatgttgttgacgcttgccctgatactgataggccaggtagcccaggctcaatcaaagcaagtaacaggcgtcgtgaaggatgccacaggagagactgtcataggcgccagcgtacttgaaaaaggtacaccaagcaatggtactattaccgatatggacggtaacttcaagttaactgtcagcagtggcaatgccacactacagatttcgtttgttggttatcagacacaagaaatcagcctgaacggaaaaagttccattgctgtaacattgaaagaagactcagaaatgctggaagaagttgtggtagtaggttatggcgcacagaaaaaagagagtgttattggtgccatctctcaggtatcatccaaagacttattgtctactcccgccgccaacgtatcacaagccattgccggtaagattcccggtgtaatcacttcacagacttccggtgctccgggtgctgatgatgcccaaatctttatccgtggccgtgccacctttgcaggcgatgcgcaaccgcttatcttagtagacggtgtggaacgtgctttttcgcaaatagctcccgatgacattgaaaccatctctgtactgaaagatgcttcagcaacagctgtttacggtgtgcggggtgcaaacggtgtaatgttgattactactaagcgtggtaaggaacagaaaccggaagtgagcttgactgctaactggcagattcaaagtcctacacgtggagatacttacctgaactcatatcagtctgttgtactgcttgaagaagctttgcgtaacgatggaataaactcatggtacagcgacaatgatattgagatgtatcgcaaatcagtagccggacaactgagcggagtagacgccatgctctatcctaacgtaaattggtatgatgaggtacttaacagtacagctcctgcacaacgctacaacgtaagtattcgtggaggtacgaaacgtatgcggtactatgcttccggagaattctacgatcagacttctatgtataaaaacctgagtaacgatgcgtatggaaacaaatcaagcctgaacttccgccgttacgctttccgtgccaatactgatttcttcttgacgaaagatttgactttctcagtaaacttcggtacacgctttgaggaacgcagaggccccaagactacagaaagaggcgactacagtgaagtgttttatgaaatcaatcatactccgggctggatatttcctgtagcttatgaagtacaaagtggtgaaactacccgctcactctatggcggtagttcacagtatcagaataacatagtagctgcattggcagaaggaggttattatcgttcagtaaacactattaatgaaacaaacttcattgtagattataaattggattggctcactgaaggtttaagtgtgaaaggcatgttgtcgttcgactatgaaaacgaacatcgcagaaattataccaaaaatttcgccacctatgaattaaacaatcgtgataattataattctattgatgcttacaataaattcaacactgataccgaattagcttatggttcttctttcacctctatctataaactctatatggaggctcaggtgaattatgcacgtaagttcggtaaacatgatgtaaccggtatgatgctatatatgcagaatgattatcgtaacaaagctgaactggcagaacgttatcaaggtatcgtgggtcgtgttacttatggttatgatgaccgttatttgtttgagttcaatgccggttataacggttccgagaactttatgaaaggtaaacgtttcggtttctttccttccgtatctgtgggctggcgtatcaccaatgaagaattcatgaaaggtacacaagattggttgaacaacctgaagcttcgtgcttcttacggccaggtaggtaatgatatttataaaataggtggtgccaagcaacgcttcctgtatgaacagaaatggaaccagattggtaatgactaccgatatggagaaacctggcaatccggtatttatgaatctcaatatcctaactatggtgttacatgggaacgtgcccataaatataacctaggtttggaatttggattgtggaacggtctgctgagtggtaatcttgacctcttctacgagaagcgtaacgacattctgacacagtatctcactcgtccgcaatgggttggagtggccatggcagctgccaacctgggaaaaacgaagaacagcggttacgaaatcgaactgaaacatgccaaccacatcggtaaggatttcaactacacagtgggactgacttactctcacgccaaaaacgaaatcctcatgatggacgaaccagacttgaaaacagattatcgcaagcgtgaaggtcatcctatcaatcagtactttggtctggtatgtgacggattcatcacacaagccgacattgatggtggaaagcttcccgtgtccaaacttggtgaaaacgtaggaataggagatttgaagtatcgtgatatgaatggtgacggactgattgatgaacgtgacgaaaccttcatcggttacagtgatattccggaaaacacgtacgcactgtcattaggagctaactacaagaactggggattcagcgttatgtttcagggcgtgaatcacgtaagccgctattatgacgctgaagcaatgttcgcttttgtaaatggaggtaaggtgaaagaacatcatctggaccgttggaatccttccaagagtgaagctgaaaacttagcaaatgccaaatatcctcgtcttcactatgacagctacggcaatcataaccaacgcggaaactcattcttcctgaaaaacggtgcattcatgcgactgaaaaatatagaactgagctacaccttgcctactttgtgggccaagaaagtagggatgagcgactgccgcctctatgtaaatgccaacaacctgattacctgggatgacttggatggtctgaccgatccggaaagcaacggttcaaaccgctatccgattatgaaaaccgtaaactttggtgtaaacattaaattctgatagaaatatgaagaaagcattattatacagtatattcgctcttggtattgcctccactaccctaacctcctgcgaggatatattcggtggcttccttgacaaacaacccagcaatgagttgaccggcgaacaagtgttcagcgattggaatctgactgtacagttccacctcgacacttacaatttcctgcgccacggtgcaggccgcatcagtactacttggctagatgcagcaaccgatttggccgagacttcctatgggaatggtgtaagaacctctttcaatatcggcaacttctatggaggttcgggtgcatccgaactggttgatacttgggaacactactatcgcggcatccgcaaatgcaatatgcttctcacccgcatagaagaagtgccccaaaaccctgccgacagcgaagacaaatataatagagacaaaaagaactatatagcagaagcccgtttcctgcgcgcatacttctactgggaactatttctgcgctacggtcctatccccattgtaacagaagtgctcgaccctaatggcgatttgatgagtaaatatacgactcgtcccacgacaaaagagtatgtagtagactttattttagaggaactcaaaagctgtgaaggcaatttattggattatgaaacagcatggaaatcaagttccgcaggacgcatcggtcagcctatggcatgcgcactccggtcacgcattatgcttttcatggcaagtccacgctatagtagcgaatctggtatcacctggcaacaggctgctgatgttgccaaagaattcattgacacctatggaacaaactttgcattgtttaatgctaaagatgctactggtgccactttaggaatagagaactataccaatgcactgttgagaaccgcctatcaaggtagcaacaaggaagttatcttctaccgaaatgatgacaagcagaattggggcaatataaaaaatgacacaccggtaggtgagggaggcaacggtggcctttgtccgtcacagaatctggtggatatgtatgacatggcggacggctcttctccctttagcgagtatgatgctaccggcgccccggtatataccggcaattcaatgattcccgccatcaatcctgcaagcggctataatgatgcccaaccgtggagtaatcgcgatccgcgtctggctgccacagttctctatcaaggagctgaatggggtaacggaagcattgacgtaagatttggaatgcgtgacaacccaagaggtaatgcaaactctactcctacaggatactatgtacgcaagtatattcccgaatcaattcttagcgttgaacattccggaacagcctatcgcctgtggactatcattcgctatgctgaaatcatgatgaactatgcagaagctatgaatgaagtgaacggcccttgcagtgaagtgtattccatgctcgaccaaatacgccaacgcgcaggcatttcgggtagtgtgaccgaccgcaccgacttgagtactaaagacaagatgcgcaacttcatccataaagaacgcaccatcgaatttgcattcgaagagcatcgcgcatgggatgttcggcgctggaatgtagcaactgaagcattatcacgtgacatctacggagtgaatgtgactgaaaatggaaccatcacacgtaaagtagcccaaaaacgcgtattcgaagataaaatgtatctctatccgatacctgagggagaatactggaagacgaacattgaaaataatccaggctggtaatcttaaatcgaatatattatgcataacaatatgaatcatataatgaacaaactggcaggaatcagcaaattcctgttgtggggagtcctgattatcctatccggtacagtccgggcgcaggacgaacagacattaaaagggcgtatcttagatactgacggtaccccaattccgggagctattgtgaacgttaccgagcagagccgcatagctctgtctgatgataacggtttcttcagtttgaagaatgtaaaagcaggcgatgaactctgcgtaagtagcataggctacaaaaatactacggctacagccgaatttaatgataacttcaaaattgtgatggaacctgacgtagacgaatatctacacacaatgccaatagctttcacacgcaaaccaaagaagtttatgactgaatccacctcggcagtagctggtgaaaagttacaaaagtatcccattacggtgctccagaatgcattttcttctactgttaccggtatggaaacttatgagtggtccagcgaaccgggatggacggaaacagccatgtatatccgcggtatacgtaccatgaactccggtgcccgcaatccgctaataattgtagacaatgtagaacgcgacctttcatttctcgacgctttccccattgagaatattactattctgaaagatgcagccgcaacagccatctatggtatgcgcggtgccaacggtgccattctggtaaccacgaaacgcggtgaaacaggaaagacgaagatagacttcacgcaagaagtaggtttccagatgttgagcaacaaaatggaaaatcagaatgcatataacaaagcactgacaaccaaccgggtactctatctggacggaagcgatccacaatactcggatgaacaaattgaaatgtatcgtcgtgtcactgccggtgaagaactggaaggtatagaccgataccggtatttcaatacgaactggtttgatgagttgtatcgcgacatggctcctacctacaaaacaaatatgcagatcagtggcggaagcagccgtgcacgttactatgtatcattctcatatctccgccaggaaggtatgtggaattccaaatggacggaatataatgacaaattcagcacccagcacgttttgaaccgctataacctgcgctccaatctggacatcgacgtaaacaaatatctgaatgtatcattggatttgggtggacgtatcgataatatctctcagcctcgtaccggtgtattctcattggtaacattcggtgcagtagaagccgacccgatggctcctgtttacacccccaacggagaattgtactccaagagcacagctcagaatcctgcacgtttgttaggttcatccggacaggacaaaaaccgtcgtcgtaacttgtattctaccgttaatgtgacgggcgacctgtccgaactggtgaaaggactgaaagcaaacgtaacagttagttttgatgcctttgatgtatttcaatcgactcaagataacagtgtgaactcttacgagtacgattacatgaatatgaacgtaaaagatccgtcacagtttgaatacaaacaaactaccaagtattctgctttgaccaatccatctgccaatgaacgtgccaactactacaattttaatttcaatgccggtttcagctataaccggtcatttggaaaacatgctgtagatgcccgcgccttcatacgtacatatcagaatatggaaaacgtacgcgacgctaacaaccatgatgtaggcaagctttcgtccaaccgtttcttgtcatacaacggacaggcaacttatgtatatgataacaagtatatcctttctggaaacttttcgcggatggccagtgataactacgcaccggaagaccgctggggtaatttctatggagcctctcttggttgggtagcttcagaagaggcatggttgaaaaacaagaatatcagcctgctgaaactacgtgcttcatttggtcacgttggacaatcttctacgggcagtaatcgttacccctaccaaagtacttttggaacaagtaccggttatagcttcggaacttccaatacaggcgtaggaggtgttgcagaaaccctctccggcaaccacaacaataaatgggaactctctgatatgcttaatgttggcgtagatttcgacttctggcataagaggctctacggctcattcgacgcgttcaaagaatggcgttccaatattctggtaacccgttccaatactcccagccttttaggtatcggtgtagcacaagatgcctatggaaaagccgaaaccaaaggtatggagttaacaatcggacatcgtaaccgcattggtaaagtgacttatttcttggaaggcatgctgacctggaataccaataagattaccgaaatggacgaaacagaaccgaatgtagagtggcaacgcaagaccggtaaacggatattcgaatacacttctgtagccggactttatgaaaatgtatttaacggaacagtaggcggttggaatatttacaaattccaacaatgggcaagcgatcctaatctgattgctactagtcaacaagacgctatcgatcatccggaaaagtatccatataatacggctgcaggtagtgcaaaaaggcaagatctcggtacagccgttttcaaagatttgaacggtgaccgtcaaattgatgaaaatgatatgattccaagtggttataccattatccccgaaatgactccttctttgtctttcggtgttgaatatgcaggttttgatttacaggcaacgcttacggcatatctgaatcgttcagtattcatctcacctgccatgacttggtctccttggggacatcaggcaactcatgaaatcaccaaagcatggggatactacacggatgatccgaatgaccctcgaaacgtaaatgcaacctatccgcgtcccacgtatgctgggttcaatcctattgacagcgaaagaagtactaacacttatatgaatgatatctggatagtaaatggaaattatctgtcactacgcaacattgaacttggatactctttacccaaaaggctgattgcaaaagccggtatgaccaaatgtcgtatctactttaatggatacaatttattcaattggagtcacttgcctgataatctggatccggaaaagcctatgagttacacatggtggtatcctaagacccgcacattctcttttggtataaacgttggtttctaacctttcaataaacaagattatgaatacgaaaaagattataaaatatatagcagtagcgctgttagcatacggaacttcttcctgtagcgacttcctggaaaaggaagtggacttgaccctctccgaggagcaagttttcagaagctacgaaaacacccgtggtttcttagccaatatttacacttatttaccagacgcttttgttggctacacagatggacaattccgaagcgcatcccgcgattgcatgaccgataacgctttaggttggtggtcagtattgtattatggcagtgtacttacagatggttattcagctattaaccacccattcgccaatgacttttggcccaaaaacagcagagctatccgggcatcgaacctattcctaaagaatgttcgtgaagaagttgttggtaactatgataagaccggtgacgataatcatttgtatgatcgctatgtagccgaagccaaattgcttcgtgccatcttccacttcgacatgtcttcttggtttggcgacatcattattgcaggtgatgatgaagagggtgtacccatcgtttttcagcagaatgacccacgcatgaatgtaccgcgcaataaatgtgcagacgttatgaaatgggttgccgaccaatgcgacttggtgaaagatgtattgccgttccgctacagcaacgaaaatgagaattgggggcgcgtgaatggtgctgccgcttatgctttaaaggcaagagccctgctttacagagcttccccactaaacaatccgaccaataacattgaatggtggaaagaagccgctgaagcagcacgtgcattcataaccaaaaacaatcagcaaacgaagccatacaagctatacagaacatctgataatgaccctacacagaactattatcaatgtttcgtaacaaccccatatttcaacgacgaatatatcttgactcgttctgtatggaccactcatacagtggaggattatctagctcctgccggctttaccaattcaagcggtcgaacgaatccaacccagaatttagttgattcttatgaaacaatcaatggtttgcctattgaccaagactcaagttacgatcctcaaaatccgtatgccaaccgagatccgcgccttgaacagacaatcctgcatcagggctccatctggggagacaaactgaatgaagaggaacgcgccattgacgtatcttatccaagcggagcagactatgagacacaaaacggtggtaccttaacaggttactatacaaaaaagtacttgaacaatatgtcattcaagagtccgtcaaactataatcatgtgtgtcccattttccgttttggagaggttttattgaacgcagctgaagccgtaaacgaagcctatggaccatccgaagcttatcaatatatcaacgaattacgcgatcgcgtaggtatgcctgcttatagcggcatgaatcaggaacaactccgtgaacgcattcgcaacgaacgacgtattgaattgtgctttgaagaccaccgtttcttcgatgaacgccgctggaaactttttgagaatcaaacaccaaccagcgaaaaaaatctgccatactacaagcaagtctataatctttatggtgtcactgttacaaatccggaaaatgcagtgtacacatacggctctgccagaaattatccctcacgcacattcaatacgcctaagaattactatttcccgatacccgatgcggaaactaagagactgccaagactgggacaaaatcaaggttgggaactcaatacttctacaggtggaagcgaaaacgattcgaatgaagaagaaactccggctgaataaagggaaaatgttatagaacaaaacatctaaagaattaagttatgaaacaatataaatgtctgattaccttgtttgcagctgctctctttatgggagcgtgcagcgacgatgacaacgactatggtaccgagggaattgccatagaaacgcctgccataaccgatgaaacaagcacttcgtctgcctcacttagtgtggcagtcaacatgcgcgatgatgtacgctatagtggtgccggcttttgttacagcttgcaatcgtctcctaccatccatagttccacagtcaaagcgctcgtcagtaatggaacattatctgctacactgacagatttagctcctaagcgtacttattatgtacgagcattcgtatgtatttatcaaggtgacgtagtctattcgcccgaattcaccttcaatacagcaaacggaacattggcagaacagttggctacttaccaagctcctacctaccctgacaattatactgcaattgctaactggaatatgcgcgaccaatggaatctttctaatgtacacgacccatcagtagtcctagcagaagatggttattactatatgtaccagactgatgcttcttatggaaatgcacatggaggacacggacatttccatgcacgccgttccaaaaatctggttgattgggaatatatgggtagaagtatgaaagaacttcccggctgggtagtccccaaattaaatgaaatccgtcaaggaatgggattacaaccagttgctaccgctgctgaaatctcctatggtttctgggctccttgtgtacgcaaagttagaaacggtttgtatcgtatgtactattctatcacttgtccaggattactcaacggtgaaggtacctggagtgaacgtgcatttatcggaatgatggaaaataccaatctttctaataatgatggatgggtagataaagggtatatagtgacaaatgcttcagacaaaggacttgagtttaatgttacagctggagactgggcaaactgttactacaaatggaatgctatcgatccttcctacatcatcactcctgaaggtgcacattggttaatttatggttcttggcatagtggcatcgttgccatggaactaaatggaataactggtatgcccaaacaaaatctgagtatcccttgggcagaaggtaatgcgcctgccgaatatgggcagttaattgccacccgccaagctggtaatcgttggcaagcaagtgaaggtcctgaaatcatttacaatcctcaaacagaatattattatctgtttatggcttacgatgctttggaaataccttataacacacgtgttgcccgttcaaaaagtatcactggtccctatttaggcattgacggtgccaatgttaccgaaggagctgatatgtatccagttgttactcatccatataaatttgccaatagcgatggatgggtggggatctcacattgtgctatattcgatgatggcaatggcaattggtattatgcttcacaaggacgtttacctgagagtgtagacaatgctatcatgctgggacatgtacgcagtattcgctggaccaaagacggatggcctttggtgatgcctgaacgttatggtgccgtacctcaagcagctatcactgaagaagaattaattggtgattgggaacatattgacttatcatatgcaatcggtcaacaaaaggaatcttcaataatgacattaactgatgatcataaagtatcagaaggtaattggagagatgcttcctggagctacgatgcaactacccaaattctaaccatcaatgacattgatttatatctgcaacgtgaaacagactgggaagctaaacccagaatgcatactatcgtttatgcagcttatgggaacaataaaacttattggggtaaaaaagcaaataaatgaagcaacaagcagtaactatccttgtggccccagtttcaccaatgtttcagcaaaagtagtttcttgtagcctagcagaaatagaaggatacaacattaattgcacatgctatcttggtgaagtagttattaagtaaatgtataataatcgctcattctcattctgaaaaactgccttgaatatcactatattcaggcagtttttttacttttatgttacataacatatacaagtgttactaatacactcaattaaagtgttacttttacacccaaaatcggataattatctcatttacattaaaaatagaaccatgaaaaacagttttctacttgcaggaattgccgcactgatgttatctgcgtgcaataataagccagctcaggagttgactttgtccggtctgaatccggtgaatttccaaacagaagtgaacaatgccaaaacaggtctttacaccttgaagaacaagtcgggcatggaagtgtgtattactaacttcggtggccgtattgtttccattatggttcccgacaaaaacgggaatatgcaggacgttgttctgggtttcgacagcattgctgactatgtaaacatcccgagcgacttcggcgcttctatcggccgttatgcaaaccgcatcaaccagggaagaattgtattggacggagagacgatccaattaccgcaaaacaacttcggacactgcttgcatggcggtcctaaaggctggcaataccaagtatatgaagccaatccgattgatgaaactacactggaactgactcgtatctcaccggacggtgactctaactttcccggcaacgtaactgctaaagttcttttcaaactgacagatgacaacgctatagatataaagtatagcgctactacagataagaaaacagtcatcaacatgactaaccactcttacttcaacttatccggtaatccttcaaaagctgcaacagatcatatcttatatgtaaatgcagacaattacactccggtagacagtactttcatgaccactggagaaatcgtaacagtgaaagatactccgatggactttactactcccaaaacaataggacaagacatcacaaacttcgactttgttcagttgaaaaacggaaatggctatgaccacaactgggtactgaatacgaatggagacattgctcaattagctgcaaaactgacttcacctgaaagcggcatcactctggaagtatataccaacgaaccgggtatacaagtttataccggcaacttcctggacggaactgtaacaggcaaaaaaggtattacttataatcaacgtgcttccgtatgcctggaaacacaacactatcccgacagtcctaataagccggaatggcctagcgtggtattggagccgggacaaacatacaacagcgaatgtattttcaaattctcagtagagaaataatagttaacttttaaatattagaattgtggaagcattagattggatcgtaattggagtcttcgctttagctctgattggtattattgtttgggttgtcaaacagaaacaaaatgactcagcggattatttcctgggtggacgtgacgctacgtggattgctattggtgcatctatttttgcatcaaacattggttcggaacacttgatcggactggctggtgccggggcatccagtggtatggctatggcacactgggaaatccagggatggatgattcttattttgggatgggtattcgtaccgttctattcaagaagtatggtatatacgatgccggaattcctggaacgtcgttataacccgcaatcccgtactatattgtctgtaatctccttgatcagttatgtactgactaaggtagcggttacggtatatgccggtggtctggtattccaacaggtattcggcattgaagaactctggggaatcgatttcttctggattgcagctatcggtctggttttgatcactgcattatatacgatcttcggtggtatgaagtcagtactttatacttcagtattgcaaacacctattttattgttaggttcactgattatccttgtactcggtttcagagaactgggtggatgggacgaaatgatgagaatttgtggtgcggtaactgttaatgatcaaggcaacaccatgacggaattaattcgtagcaatagtgacccgaacttcccttggttgggagcattaatcggatcagctatcatcggtttctggtactggtgtactgaccagttcatcgtacaacgtgttctttcaggtaagaaccagaaagaagcacgccgcggtactatcttcggagcttatctgaaattgttacctgtattcttgttcttgattccgggtatgattgcttttgcacttcatcagaaatacctcggtgcaggtggtgaaggtttcttgccgatgctggctaatggcagcgccaatgccgatgcagctttcccgacactggtagccaagttgttgccggctggtgtgaaaggtctggtggtttgcggtatccttgcagctttgatgagttcgttggcatctttgttcaactcatctgccatgctgtttacaattgacttctacaaacgcttcaaaccgaaaacttctgaaaagaaactggtagttatcggtcagatggcaactgtagtgattgtaattctgggtattttgtggatacctatcatgcgtagcgtaggcgatgtactttatacttatttgcaagacgtacagtctgtattggcaccgggtatcgccgcagccttcctgttgggtatctgctggaaacgtacttctgcacaaggtggtatgtggggattgattgccggtatggtaatcggcctgacacgtctgggagcaaaagtatattacagtaatgcaggagatgtagccggtggtacattcaaatacctattctatgatatgaactggttgttcttctgcggatggatgttcctgttctgtatcattgtagtgatagtagtcagtctggcaacgaaagcaccgtctgaagaaaagatacaaggattggtattcggtacctctaccccggcacaattggctgagacacgtgccagctggaatcattgggatattatccatacgattattatcctgggtatcactgccgcattctatatctatttctggtaaaatagctacgagctacaagctacaggcgacgagtgccatccggcatgatagcgtaacttacttgtagcttgtagcctgtagctcgtaactaaacatatatgatgaataactattatagttcaaatccgaccttttacgttggtatcgactgcatcatcttcggtttcaacgaaggagaactgagtctgttattgctgaaacgaaactttcagccggcaatgggtgaatggtctctgatgggtggattcgtgcaacaaggtgaaagtgtggataatgctgccaaacgtgtactggcggaactcaccggtttggaaaatgtatatatggagcaagtagggtcgttcggcgaagtggaacgtgatccgggagaacgggttatctctgttgcttactatgcattgatcaatatcaacgagtacgaccgcgaactggtgcaccagcataatgcctactgggtaaacatcaatgaattaccgcctttgatcttcgaccatccgcaaatggtgaaacaagcacgggaattgatgcaacagaaagcatccacagagcctatcggcttcaacctgttaccgaagttattcacgctgtctcaactgcaaagcctctacgaagctatttacggtgaacagatagacaagcgtaacttccgtaaacggatagccgaaatggactacattgaaaaaacagataagattgataaaacaggttccaaacgcggagctgccttatacaaattcaatgaaaaggcatatcgcaaggcaccgaattttaaattataaattatgctggaagaactgaaagaaaaggtattccatgccaaccttgaactggtgaagcatggactggttatcttcacctggggaaatgtatcggctatcgaccgtgaaacgggactggtagtcatcaaacccagtggtgtaagttatgacgatatgaaggcggaagacatggtggtggtggacctcgatggcaaggtagtggaaggacgattgaaaccgtcttcagacactccaacccacgtggtactctacaaggctttcccagaaatcggcggtgtggtacacacccactctacttacgctactgcctgggcacaagccggatgtgacattccgaatattggaacgacacatgcagattacttccacgatgccataccttgcacggcagatatgacaaaggaagaagtggaaggagcgtatgaaatggaaaccggaaatgtaatcgtgaagcgctttgaagggctgaaccctgtacacacaccgggagtactggtaaaaaatcatggccccttctcttggggaaaagatgcgcatgatgctgtacacaacgcagtggtaatggaacaagtagctaagatggcaagcattgcttatgccgtcaatccgaaactgaccatgaatccgctgttggtagaaaagcatttcaaccgcaagcatgggcctaacgcttattatgggcaatgaacaactgtcaattaaaaattaacaattaaaaattaaaacattatgaacgcatttgatcaatatgaagtatggttcgtaaccggagcacagctcctgtacggaggtgacgcagttatcgcagtagacgcacacagtaatgaaatggtagccggattgaacgccagcggtaaattgccggtaaaggtggtttataaaggtacagtaaactcttctaaagaagtaactgaagctttcaaagctgctaacaatgatgagaaatgtatcggcgttatcacctggatgcacactttctctcctgccaagatgtggattcacggtttgcaggaactgaagaagccgttgctgcatttccatactcaattcaataaagaaattccttgggataccatggatatggacttcatgaacttgaaccagtctgctcacggtgaccgtgaattcggccacattgtaacccgtatgcgtaaaaaccgtaaggtagtggtaggacactggcaagatgaaaaagcacagggtcagattgcaacatggatgcgtgtttgcgctggatgggctgatgcacaagatatgctgattatccgtttcggtgaccagatgaacaacgttgctgttactgatggtgacaaggtatccgctgaacaagttttgggttaccacgtagactactgtccggtaaacgacctgatgaagtactacaatgcagtggaagacaaagatgtacaggcaatagtagatacttacttcaaagaatatgaccatgctcctgaactggaaaaagccggaacagaagcttatgccaaagtgtggaactctgcaaaagcagaaatcgctctccgtcgtatcctgaaagatacaggtgccaaagcatttactaccaacttcaacgacctcggtgactttgaccagattccgggattggcttctcaacgtctgatggaagaaggttatggtttcggtgcagaaggtgactggaaaactgccgctttgtaccgtaccacatggttcatgagccagggtatgccgaaaggttgttctttcctggaagactacactttgcatttcgacggtgaaaagagcgctatcctccaggctcacatgctggaagtttgcccgctgattgctgaagcaaaaccgaaactggaagtacatcgcctgagcattggtatcgacagcgaaaccgcacgtcttgtattcaccagcaagcaaggtgaaggcgtagctgctactattgttgacctgggtaaccgtttccgcctcatcgtaaacaaagtagaatgtatcaagagcaaaccgctgcccaaacttcctgttgccagcgcattgtggattccgatgccgaacctcgaagtaggtgctgctgcatggattctggcaggtggtactcaccacaccagcttctcttacgatctgactgtagaatattgggaagattatgcagaaatggcaggtatcgaaatggtagttatcgatgaaaatacaactatcagcgagttcaagaaagaactgcgcatgaatgaagtatattacatgttgaacaaagcgctttgttaattatgaaactagacgcaaaatcaaccatcgaagcaggcaaggccattcttggtatagaattcggttccactcgaatcaaggctgttttgattgaccaggaaaacaagcccatcgctcaaggaagtcacacctgggagaaccagttggttgacggactttggacatatagcgttgaggccatctggtatggactgcaagattgttacgccgaccttcgctcaaacgtgaagaagctctatgacatagaaatagaagctttggcggcaattggcgtcagcgccatgatgcatggttatatggcattcaatgataaaaaagagattctcgtgcccttccgtacttggagaaacaccaatacaggtcaggctgcggctgctttatcagaactgttcgtttataatattcctctgcgttggagcatttctcatttgtatcaggctattctggacaacgaagaacacgtgaaagatatcaattatctgacaacgctcgcaggttttatccattggcagataaccggtaaaaaggtattaggcataggcgatgcatcaggtatgctccctatagacccggttaccaagaactactccgctgaaatggtggccaagttcgacgggttaatcgctccgaagggatataactggaaattgctagaaattcttcccaaggtattgccggctggtgaaaatgctggtttcctgacaccagaaggtgctaagatgctcgacgtatccggccatttgaaagctggaataccggtttgcccgcccgaaggagatgcaggtaccggtatggttgcaaccaatgccgttaagcagcgtacaggaaacgtatcggcaggtacatcttcattctccatgattgtattggagaaagatctgtcaaagccctacgaaatgatcgatatggttactactcccgatggaagtcccgtagccatggtacattgcaacaactgtacgtccgacctcaatgcatggatcaatctgttcaaggaataccaggaactgctgggtatacctgtagatatgaacgaagtatatggaaaactctacaaccatgccctgacaggcaatgcggattgtggcggtctcatttcattcaattacatctcaggcgaacctgtaacaggttttgcagatggaagaccgatgtttgtacgttcggccaatgacaagttcagccttgcgaacttcatgagaacgcacttgtatgcttctgtcggtgtcctcaagattggtaatgacattcttttcaaagaagaaaaggtgaaagttgacagaatcacaggacacggaggtttgttcaagactaagaatgtgggtcagagagtacttgcagcagcattaaattcaccgatttccgtaatggaaactgccggtgaaggtggtgcctggggtattgcgttgctgggggcattccttgtgaacaacgagaagaagcagcctctcgacgctttcctggatgagcaggtgtttggtggagatgcaggtattgagatagcgcctacagctgaagatgtagcaggctttaacgcatacatcgaaaactacaaggcagcactgcccatcgaagaagccgcagtgaaattcaaaaagtaattcctacttcaaggaataaacgaatgtaatagtatagggaaaagcttcggctgccacgtgggtgctgttggcaccggagcaactccctatacattcgttctacaagctcggacaattcattgaatccggcaaagcatcgttaccagctcaaaagaagtactctcacccgcttaggtgaagcaccttcgtcagtaagcaaataatctctatacctcaaatataatataatatgaaaacgatccttattacttacctgttccttttttgttttctcctgaccgggaaagctcaaacccaacaagaagtttcctatttccctttgcaagatgttaagctgctggaaagccccttcctgcaagctcaacggactgacttacattacatcatggccatggagcccgaccgcctgctcgcccctttcctgcgcgaagccggactgacgcccaaagcgccaagttataccaactgggaaaacaccggactggacggacacatcggcggacattacatttccgcactctccatgatgtatgccgctaccggagatacagccatatacaatcgtctgaactatatgctgaacgaactacatcgtgcacagcaagccgtaggcaccggattcatcggaggaactcccggaagcctgcaactttggaaagaaattaaagccgggaatatccgtgccggaggtttcgacctcaatggcaaatgggtacccctatacaatatacacaagacttatgccggactgcgcgacgcttacctctatgccggaagcgaccttgcccgccagatgttggtagccctcaccgactggatgatagacatcaccgcaggactcaccgaccaacaaatgcaagacatgctccgcagcgaacacggaggactgaacgaaactttcgctgatgttgccgaaatcacaggtgacaagaaatacctggaactggcacgccgtttctcccataaagtaattctggaccctcttgtgaaggatgaagaccgcctgacaggcatgcatgccaacacacagataccgaaggttatcggctacaaacgtatcgccgaccttgcacaagaccagaattgggatcacgccgcccgcttcttctggaacacagtggtaaatcatcgttccgtctgcattggtggcaacagtgtacgcgaacattttcatccggcagacaatttcacatccatgctcaatgatgtgcaaggtccggagacttgtaatacttacaacatgcttcgcctgacgaagatgctttaccagacttctcccgacattcgttttgccgattattacgaacgtgctttatataatcatatccttgcctcacaacagcctacaaagggtggatttgtttacttcacccctatgcgtccgggacactaccgcgtttattcgcagccggaaacatccatgtggtgttgcgtcggttccggattggagaatcacaccaaatacggagagtttatttacgcccatgcaaaggatacgctgtatgtaaacctcttcatcccctcccgtctgacttggaaagataaaaagataaccctggtacaggaaacccgtttccccgacgaagagcaaatcagattccgcgtggaaaagagcaagaaaaaagcattcagcctcaaactccgttacccctcctgggctaaaggcgccagcgtttccgttaatggaaaagtacaggaaacgaatgcccaaccgggagagtacctgaccattcaccgcaaatggaaagccggagatgaaatcacactgaatatgcccatgcaggttgccttagagcaaataccggatcgggaaaatttctatgcattcatgtatggccctatcgtacttgccagccccacagggacagagaatatggacgggctttatgcagatgacagccgtggcggacacattgcccatggcaaacagatttccatgcaagaaataccgatgctggtaggttccgccgcatctctgccccaatcactccggaagataaacgatgacttggttgcatttacttataccggtagtgtctatccggcacagaaagaagcgctgaaattgattcctttcttccgtcttcacgattcccgttatgctgtttatttccatcaggtaaccgaagctgaagtagaaagtatccgcaaagaagtggcattgagcgaacgtaaagcaatggaacttgccaaccaaactgtagatctcattttccccggtgaacaacagcctgaatcggatcatggcattctatatgaacaggcagaaaccggaatcaataaagaccgtcacttccgacgtgccaaaggttggttcagttataacctcaaagtaaaagaggaagccagccagctgatgatcactgtacggaaagaggattataccaaggtagccatccttcttaacaatgaaaaactgaccgttagtcctacgatcagcaaacctgataaagagggttttataacgatctgttattctttaccccaaaagttaagtacaggcagctatccgatacgcttcagtcccgacggaacagagtggacacctgctatttatgaggtccgcttactcaaataataacattacgaacatcatataactaataaccattatgagaaacaaactattattcagcagcgttcttttagctgcatccgtatcgctgtccgcacaaaagagtgcaacgatcacgcttcatgccgaccaaggcacacaagttattcccaaagaaatttacggccagtttgccgaacatctgggtacctgtatctatggtggactttgggtaggagaaaattcggatattcccaatatcaaaggttatcgtaccgacgtattcaatgcattgaaagaactccaggttcccgtacttcgttggccgggtggctgttttgccgatgaatatcactggatggacggtatcggtccgaaagagaaccgccccaaaatggtaaacaataactggggaggtacaattgaagacaacagtttcggtacacatgagttcctcaacctctgcgaaatgctgggtactgaaccttatatcagcggaaacgtaggtagtggtactgtagaagaactggcaaaatgggtagaatacatgacttccgaaggagattctccgatggcaagacttcgccgccagaacggtcgtgacaaagcatggaaagtgaaatacctcggtgtaggcaacgaaagctggggctgcggcggaagcatgcgtcctgaatattatgctgatttgtatcgccgttactccacttactgccgcaactacgacggcaaccacctgtttaagattgccagtggtgccagcgattacgattataactggactaaagtcctgatggatcgcgtaggcggacgtatgaacggactctctctccattattacaccgtaaccggctggagcggaagtaaaggagcagccactaagttcgacaaagacgattattactggacaatgggcaagtgccgtgagatagaagacgttatcaaaaagcattgtgccatcatggacgaatatgatcctaaaaagcacgtagccctcatgctcgatgagtggggtacctggtgggatgaagaacccggcactatcccagggcacctttaccagcagaataccttgcgtgacgctttcgttgcctctcttagcttcgacatcttccacaaatacaccgaccgtctgaaaatggcaaatattgcccaaatagtaaatgtattgcaatccatgatcctgacaaaaggtaaagacatggtgctgactcccacttattatgtattcaagatgtacaatgtacaccaggatgccacttacctcccactcgatctgaactgcgaggtcatggatgtacgcgataatcgtaaagtacctatggtaagtgccacagcttctaaagacaaggacggcaagatccacatctcaatgtctaatatcgatgccgacaatgcacaggaaattactatcaacctgccggatgtaaaggctaagaaagccgttggtgaaatcttaacttctgccaacctgacagattacaactcttttgagaaccctaataatataaaattagctccgttcaaagaggtaaaaatcaataaaggcgtactgaagataaaactaccagccaagtctattgttactatagagttacagtaaatcagtcgaaaagacttattgtattttaaacaagaagctagcggaagtacagcaaaaaaagaggctctttctttgttgcgaattacgcataaagagttatctttgtcgctgttaaaattaacaagtgacacttcaacctgctttattatagtattcaaatcaaataaatatcaatatgaacgacaacaaacttatgaaccgtgcagcggataatatccgtatcctcgctgcctctatggttgagaaagctaattccggtcatccgggcggtgccatgggcggtgccgattttgtgaatgtactcttctctgagtttctggtgtatgatcccgaaaatcctgcatgggaaggtcgtgatcgcttcttcctggacccgggtcacatgtcaccgatgctctactctcagttggcattggcaggtaaattcacactggatgaactgaaggaattccgccaatgggacagccccactccgggacaccctgaacgcgacatcatgcgtggtattgaaaatacttccggcccgctcggccaaggccatactttcgcagtgggtgcagctatcgcagctaaattcatgaaagcccgtttcgaagaagtgatgcagcaaaccatctacgcttatatttcggacggtggtgtacaggaagaaatttctcagggtgcaggccgtatcgcaggtgcactgggactggataacctcatcatgttctatgatgccaatgacatccagctttctactgaaaccaaagacgtaactatcgaagatactgccaagaaatacgaagcttggggctggaaggtgatcaagatcaacggtaatgatcccgacgctatccgtggcgctttgaacgaagcgaaagcagaaaacgaacgtcctaccctgattatcggtcataccgtaatgggtaaaggtgcacgcaaggcagatggcagcagctacgaagctaactgtgctactcacggtgctcctctgggtggtgacgcttacgtaaataccatcaagaacctgggtggtgatccgacaaatccattcgtaatcttccccgaagtgaaggaactgtacgcaaagcgtgctgccgaactgaaggaaattatggctaagaaatatgctgcaaaatcagaatgggcaaaggctaatcctgaaaaggctgccaaactcgacctgttcttctctggtaaagttcctgaagtaaactgggcagctatcgagcaaaaagcaggtgctgctacacgtgctgcatcagctaccgtattgggcgctcttgctactcaggtagaaaacatgatcgttgcttccgccgacctttcaaactctgataagacagacggcttcctgaaaaagacgcatgctttcaagaaaggtgatttcagcggtgcattcttccaggctggtgttgccgaactgactatggcttgctgctgtatcggtatggcactgcatggtggtgtaatccctgcttgcggaacattcttcgtattctctgactatatgaaacctgccgtacgtatggctgcactgatggaagttcccgtgaagttcatttggacacacgacgcattccgtgtaggtgaagacggtcctactcatgaaccggtagaacaagaagctcagatccgtctgatggaaaaactgaaaaaccacaaaggacacaactctatgttggttctccgtccggcagatgcagaagaaacaacaattgcatggaaactggctatggagaatactaccactccgaccggtttgatcttctctcgccaagatatcgctatgttgcccgctggaaacgactactctcaggcagccaagggtgcttacattgtagcaggttctgatgaaaacccggatgtgatattggtagcttcgggctcagaagtatctacactggtggcaggaaccgaattattgcgcaaagatggcgtgaaagtacgtatcgtatctgctccttccgaagggttgttccgcagccaggctccgggatatcaggaaggtgttatccctgctgacgcaaaagtcttcggtctgacagccggtctgcctgtaaacctgcaaggtttggtaggtgctcacggtaaaatttggggattggaatctttcggtttctcagctccttacaaagtactggatcagaagttaggttttactgctgataacgtttataagcaagtaaaagcaatgttataaaaagccctggtgcataccgggcgaatgattattcgcccctacaggttgtaacaggcttgtaggggcgaaatatttttcacctgatatccattatagagcctctaaatcaatcatactacaacagaaaatgaaaacaattggaatttgttccgaccacgccggatttgaattgaaacaatacgtcaaggggtggttggaaactaaaggatgggaatacaaagacttcggcacctacacaacggagagctgcgactatgcagattttgctcatcccctggcattggccgttgaagccggagagtgttacccgggtattgctatctgcggaagtggtgaaggtatcagcatgacactgaacaaacatcagggtattcgtgctgcactttgctggactgcggaaattgctcatctggctcgccagcataatgatgccaacgtactcgtcatgccgggacgttttatcagcacagaagaagctgatatgattatgagagaattcttcagcacacaatttgagggtggacgccatcagaagcgtattgataaaataccggtgagataatcatcccaacttgaaattacacttgcaggtgcgggaactggtacttgcagtagtgtaaggtgacgcttgcggatgtgtaaggcaacacttgcagtagtgaaggcttacacacccgcaagtgttttttagtttagtttatacaccttcctcagagctaagaagtataaacacatcaatttttacaccttttatgccaaaaactcttccctataatagagtcactttccgtacttttgcctgcatatctaataaccatttaaagtaaaactggaaacgcatgaaaaaagtactcggaattatttccctgcttctctcggccacattggcaactgccaactcgatagatttcgataaggctttcaaggagagtacaaagattgaaaagcaaatcaagaaaacatctttccccaaacaaacgtatctcattacggacttcggcgccaagcccgacaccccggatgctccctgccatgaagcaatcaaccaggctatcgttacatgttgcctaaatggtggtggtacggttgtagttcccaaaggtacattctacacaggtcccatcacactgaaaagcaacgtcaactttcatgtagaagaaggagccgtattgaaattttcaaccgatcagagcctctactttcccggagttatcacccgttgggaaggaatagactgctataatgcccgcccgttgatttatgcatacggtgagacaaatatcgccatcaccggtaaagggactatcgacggacaaggctccaacgaaacctggtggcctatgtgtggcgctccccgttatggctggaaagagggcatggtggcacaacgcaacggaggacgggaacgcctgctgatgtacggtgaaacctccactcctatttataagcgtgtaatgacacctgaagacggattacgtccgcaactcatcaacctgtactcatgcaatacagtgctgatagaagatgtaactttattgaattcccctttctgggttattcacccgctattctgcgaaagtctcactgtacgcggtgtatacgtttataatcgcggtcccaatggcgatggctgcgaccccgaatcttgcaaaaatgtattgatagagaactgtaccttcgataccggagatgactgtattgctatcaagtccggacgtaaccaggacggacgtaaatggggtgttcccagcgaaaacatcattgtacgcggttgctatatgaagaaaggacatggaggtgtagtcatcggtagcgaaatctccggcggataccgcaacctgtatgtagaaaactgtaagatggatagcccagacctcgaccgtgtgatccgcatcaagaccagcacctgccgcggcggactgattgaaaatgtgttcgtgcgtaacgtcaccgtaggacagtgtcgcgaagccgtactgcgcatcaacctgcaatacgaaaaccgtgagaactgcaaccgcggttttactcctactgtccgcaacgttcacctaaagaatgtaacctgcgaaaagagcaaacttggtgtccttattatcggtctcgacgacgatgatcatgtgtacaatatcagcgttgaagactcccactttaataatgttgccaaagatggaaatgacataaaaggagcaaaagacgttacgttcaaaaatctctatataaatggaaaacttgtaaagtagcaaaacctattttacatcatatacgcccgaagttgtgacattctgacagaatttcattcaacttcgggcttcatatttccccatttttcttatttttcacagaatacttgttcgttgtctctaaataaaaactatctttgtattccaataatccggaactcaatacgatatggagcaactgaaaactatcaaagagcttatcaatcaaggagatgtagcagaagctatccggcggctcgatgaatatctgatcaccgactctaccgaccgggacgaagctttctatctcctgggaaatgcctaccgtaaacaaggcaactggcaactggctttgaacaactaccagtatgctatcgacctcaatcccgacagccctgcccgtgaagcctatcgtatggcaatggatatcctgaatttcttcaataaggatatgtacaatcaataacatataaaagtaacgtaaattatggcaaagattaaaggagcaatcgtagtggacaccgaacggtgtaaaggctgcaatctatgcgtggtagcctgtcctctgcatgtaatagccctcaccaaagaggtgaacgtaaaagggtataactatgcccaccaaatattggaagatacctgcaacggctgtgcgtcgtgcgcccaggtttgcccggacggatgtatctctgtttttaaagtaaaagttgaataaatctgtaaatcagtagaatatggcagaagaagttgtattaatgaaaggaaacgaagccatcgcccacgccgctatccgttgcggtgctgatggatacttcggttatcctattactccgcaatcggaagtattggaaactcttgccgaactgaagccctgggaaactaccggtatggtagtgctacaggcagaaagtgaagtggcagctattaatatggtgtacggcggtgccggaagtggaaagatggtattaacctcatcgtccagccccggtgtcagcctgaaacaagaaggtatctcctacctggcaggtgccgaattaccctgtttgattgtaaacgtaatgcgcggcggccccggattgggaaccatccaacccagtcaggcagactacttccagactgtcaagggtggaggtcacggtgactaccgtctgatcactttggctcccgcttccgtacaggaaatggctgatttcgttggattggcctttgatcttgccttcaaatatcgcaacccggctatcattcttgccgacggtgttatcggtcagatgatggaaaaggttgtattgcctccgcaaaagccccgccgtacagatgcagaagttatcgagcaatgcccatgggctactaccggtagagtaaacggacgcaagcctaatatcattacttctctggaattgaaaccggaagagatggaaaagaataacatccgcttccaggctaaatacaaactgattgaagaaaacgaagtacgtttcgaagaaatcaattgtgaagatgccgattacctgattatcgccttcggttctatggcccgtatcggacagaaagcaatggaacttgcacgcgaagaaggtatcaaagtcggtatactgcgccccattaccctttggcccttccccacaaaagccattgcagcctatgctgaaaaagtgaaaggcatgctggttaccgaattgaatgcgggacagatggttgaagatgtacgcctctctgtgaatggtaaagtaaaagtagaacacttcgggcgtctcggcggtatcgtacccgatccggaagagattgtaagtgcactgaaagaaaaattaatcgagaaatgaaccctgataaaataagaagcgtattgaatatactctttatgatacttgccttggcagctatcatcgtatatttcgttgcaaaggatgacttcaaactgttcatctacgtttgtggcgcagcaatattcgttaagctgatggagttttttatacggttcaccaacagataaggagaagtgattatgacaaaagaagatattatcaagcctgagaatctggtttataagaaaccgactctgatgaacgataatcccatgcactactgtccgggatgcagccacggtgtggtccacaagctgatagccgaagtaatcgaagaaatgggcatggaagacaaagcagtaggtatctcccccgtgggatgtgccgtgttcatctataactatctggatattgactggcaggaagccgcacacggacgtgcacccgctcttgccactgcgatcaagcgcctgtggccggacagactggtattcacttaccagggagacggtgacctggcatgtatcggtacggcagaaacaatccatgcactgaaccgcggtgagaatatcaccatcatcttcatcaacaacgccatttatggtatgacgggtggacagatggctcctactaccctggtcggcatgaagacttctaccagtccttacggacgtgatgttcatttgcacggttatccactgaagatggcagatatcgccgcacaactggaaggaaccgcttacgttacccgccagagtgtacaaacagtcggtgctatccgcaaagcaaagaaagccatccgcaaagcattcgagaactccatggcaggcaaaggctccaacctggtagaaatcgtttctacttgtaactccggttggaaacagacacctgcgcaatctaacaaatggatggaagagcacatgttcccgttctatccgctgggtgacttgaaagacagataaatcagttaacaaggaaacgagggaacaagttaacaaggaggagatgcttcctcgtcaacttgtcaactgcaacctcgtcaactaaaagaaaagaacaatgaaagaagaaatcattatagcaggcttcggtggacaaggtgtattgtccatgggaaagattttggcatactcgggactgatggaagataaggaagtgagctggatgcccgcttacggaccggaacaacgtggtggtacagccaacgttacggtgattgtaagcgatgagaaaatctcttctcctattctgagcaagtatgacgctgccattattctgaaccagccctcactggagaaattcgaaagtaaggtaaagacgggcggtatcctgatttacgacggatatggcatcatcaacccaccgacgcgtaaggatatcaaagtgtatcgcatcgacgcaatggatgcagccaatgaaatgaataatgccaaagcattcaacatgatcgtactgggtggattgctgaaactgaaaccgatggttacgctggatagcgtactcagaggcttgaagaagaccttgcccgaacgtcatcatcacttgataccgatgaatgaagaagcgattaaaaaaggaatggaattgattaaagaggtataattccattgactcttacgataaatcaataagcccttgcaatagtttctttttgcaagggcttattttataagttaccatatttatatcaaagaaataaaaagtacgtttgtaaaaataggcaaaaaaggctgaattccgcaagcgaataattttttattgtatctttgcgcctaattatgagacgcattctactgacatatatacttctattcgtattgggattgctggcagcacaggcacagcggccactcaatacattggataatcgtgaccgctatgggaatcaggttgacccgtcaacacaaccagatagcctggataccagcactgacgttcaaagtattccgcctaaactctatatgtggcaattaagcgagactctgggtaaccggaccatcgttcctgccgacactctttccttgaatttccagaatacaaacctggtagacggtatgacgggacaatataatttcctgggtaatctcggttctccccgtctttcacgtatattctttgatcgtgaaagcaccgaaccgactatttttatgacaccattctccagtttctttgttcgtcccgatcaggtattcttcaccaacagtaatgttccttatacaaatctgacttattataaagcgggtaataaggtaaacggtgaagagcgattcaaatcttatttttctgtcaatgtaaacaaacggttggcatttggcttcaatttcgattacctgtacggacgtggatactactccaatcagtctacttcgcacttcaatgccggcatattcggaagttatattggcgaacgctaccaactgcaagctgtctacaacaacttcttcatgaagatgaatgaaaacggcggtatagcaaatgacggttacattacccgccccgatacaatggctgacggtaagaaagaatacgaatccaccactattcctgtgaagctggagcaaacttccaaccgtaacaaagacttctatatttaccttacgcaacgctatcggttaggattcaagcggagagtattgaaagaagtagcccaaaacaatagcgttaaacagaactttgctcccacggcagcatctactgccattacagacagcttagatatggatcgtttaggtgctgacagtttaggcaccgacagtctttcagcagaaaggtttgcaatgagaaaaagcctgagtctggatagccttaacaacgccactgccttggcagaagataccaattatgttgaagaattcgtccctgtcacaagtttcattcatacttttaaagtggagcgctcacgccatcgtttccaatcatacagcgaaccggagggtatgtatgaaaacacttacttcaacaaaaacggaagtgtcagtcgggactccaccacagcattcagcataaagaacatctttggcatagccctgttggaaggtttcaacaaatatgctaaagcaggattaaccgcttatatctctcataagttcagccgttatgacctgatgaatgcagattccatgacggtagaccgctttacagaacaagaaatatttgtaggcggtgaacttgccaagcgacaaggtaaagtccttcactattccatagatggtgaaataggtattatggacaaagcgctggggcaattccgtgtacatggtaatatggatttgaatttccgattgggaaaagatacggtaaaccttatcgcacgaggttttgtgacgaatacactcccatctttctatatgcggcattatcactccaaccatttcttctgggacaatgataatatggagaaagaattccgtacccgtgtagaaggcgaattaaacattgaccgctggggtactaatcttcgtgccggtgtagaaaacgtcaagaactatacttatttcaaccagaaagctgtacccgagcagtatagcggtaatatacaaatgctttcagcaactctgaaacagaacttccgtgcaggtattttccatttggataacgaagtaacctggcaaaagtcaagcaatgaaacaattctcccattgccacaactttcactatactccaatttatacatcctgaccaagttagcgaagaaagttcttacggtgcaattgggagccgatgtgcgctatttcaccaaatataacgcaccggcctatacgcctgccgttcagcaattccacctgcaaccggaaaacgatcaggtagagataggtggttatcctatagtgaacatttatgcaaacctgcaactgaagcgtacacggctattcgctatgtactctcacgtaaatcaaggcatgggtacacgtaactctttcctcgtaccgcattaccccatcaacccgagcctgctaaagataggtgtttcatggaacttctacgattaaaactctttccacatgagaatcccgaaagccagaatactgaaatacgcagctatgggtataatagccgctttcattgctacctttttttttaagaaggaaaagcagcaagggcatccgcgtgactatgcagaaatcgcagccgagaaaataatccgcgctgccacagaatacaactctatcagcttctatgttgacggagataccttatcgggctttcattatgaactgatagaagcgtttgcccgtgaccatggctggaaggctgccatcactcccgaaatgagttttgacaaacggctggaaggacttgcaacaggcgagttcgatgttatcgcttatggtattctagccaccagtgaactgaaagactctttgctccttactactccgattgtacttaataaacaggttctcgtacaacgcaaagccacatctcccactgactctttattcgttaaaagtcagttagacctggcaggcaaaaccctgcacgtagtgaaaggatcaccttccatcctccgtattcgtaatctgggaaacgaaattggtgacactatatatattaaggaaatagataaatacggttcggaacagctgatatcacttgtagctcatggggatatagattatgccgtatgcgatgaaagcatcgcccgtgccgtaacggacagtattccacagatagatatcaataccgatatcagttttacccagttctattcctggggagtcagcaaacaatcacctgttctattggacagccttaacagctggcttcagacttttcggaacagtgatgagtttaaatctatctaccgtaaatattaccggacttcgaaccagagataagttcctctcaaacaagcttatacaataaaaccggaagtttcgcacagggaacttccggttttattcttttccattcttagtttcatgccttggaactgtctgtttcattgcttggaactgctagtttcatccggtgaaactaccggtttcattgcttggaactgtcagtttcatccggtgaaactaccggtttcattgcttgaaactattagtttcataccttgaaactaattgcatcaagcaaggctctctacttcccgaagccacatctctgatgatgcatcgcttggcatacgccaatccccccgcggactgatggaaatactacctactttaggtccgtccggcagacaagagcgcttaaattgttgattgaagaagcggcggaagaatgtctgcaaccattttttgattgtcgcttcatcatacacgtccttaaatgtacgcactgcaaggaagaatatcttggaaggacggaagccacaacgaaggaaataatacaggaagaaatcatgcagctcataaggacctaccagatcttccgttatctgtttgatattgccgttttcatctgccggaatcaattcaggactaatcggagtatccacaatatccagcagcgtcatgcgcgaagcttcgtccatatcattctcggctacccatttcaccagatacttaaccaaagtcttaggcacacttccattcacaccatacatggacatatgatctccattataagtagcccagcccaatgccagttccgaaagatcgcccgtaccaattaccattcccaaagtctggttggcaatatccatcagtatctgcgtacgctcgcgtgcctgagcattttcataaactacatcatgcacatcaatatcatggtctatatctttgaaatgctgaatacaggcttccttgatgctgacctcacgaacggtgattcctaaagaattcatcaaatccagagcattcgtatacgtgcggtctgttgttccaaaccccggcattgttacaccgataatatctttacgagaccatcccaatttatcgaaagttttgacacacaccagtaatgccaatgtagaatccaacccaccggaaatgccgactaccgcactcttggcagcagtgtgtaccagacgctgagccaaaccggaaacttgtatggagaatatttcctcgcaacgctcgttcaactcaactccttgcggcacaaaaggatgagggtcaaaacaacgcgtcaggttcagttctttgctatttacatattctgtggaaacacgtaccgcctctcccggtgcgcaatgcgcccgacaagcggaaaaagttgtattaactcgacgttccgtgcgcaaatgttccacatctatttcactgataatcacctgtccctcgaaagagaaacgcttgctgcgagctatcaggctgccattttcgaaaatcagtccgttccctgcaaacaccacatccgtagtagactcaccgaacccacacgaacagaaaacataaccggcaatgcaacgagccgactgctggctgatcaaagaacacaaatagttatgcttaccaatcccttcattatccgctgacagattaaacagaatttccgcaccttgcaaggccagtgaagaactgggaggaataggtgcccataaatcctcacaaatttcaatgccgaacgtcgtatccgcagtttcgaacaataagtcagttcccattggaaccacctgcccgcaaaggcgcacgctcctttcacttacatccacagcagatgtaaaccagcgtttctcataaaattccttgtagttggggaggtaagtcttgggcactactcccaacacctttcctttttgaattacgactgcggcattcagcaatactccgttcatcgctatcggcatgccaagtatggctatgatatccaactgccttgtattacttacaatctgtatcaatcccatttccgcttcttcaagcaataattgctgggcaaacagatcaccgcatgtatatcccgtcacacacaactccggaaaagcaatgatctgcacacctttcccctcggctatgattatttccttttcaatttccctggcattgaacttacagtccgctaccttcacacggggcacagccgccgctacctttacatatccgtaattcataaggacgttatttataatattgtgacggcaaaaatacgcttatttcttcacaaacacaaaataatcatttcattcgctgcctatatcccggattatttgtacttttatcgacatttccaaacacgctatacaaaactcatgaaaacccacagtacactccataaatggttgctatccctcctgcttgtagccggatgcctatccggctccgccaaagaaaaagaatacatattattcctcagttccgtcaatgcggaagaagcatgggtgcatggtttccagaatgaacttcggacgcgctttccttatgaaaaagatattgaactgcacagctactttctggcagtcccgatacttaaaaatgaagaggaagtcaaacaggcccaggcaaatatcctgcaaatatatccggaaccacctaaagctgttataatcgttggtgatccgggatggttggtcagtgcacctatcttcgacggcccctggaaaggagtccccgtcatactctgctactcccgcggacatattccgtctactctgcaaaccttactggccagagttccccttacaaaagaaaacagcatgcccatcgaggaattcaacaagaaatacaacattaccgtattaaagcaaccttattttatagacaaaaccctgcaactcatccgtcagcttcaaccggaagtccgccggatcgctttcatttccgacgaccgctatatcagtattgtcacccgccagtccctgcaagaaattatagaaaaagatttcccgaatctggaactggaacttttgtcctcagaagaaataagcactgaagaattactggatacacttaccacctacaataaaaccaccggtgttatttattattcctggctccggcaatatggaggcaacaaaaactattatctgtctgaccatctaaaaaaaatacttcccagcttcctggaagttccggtttttacattagcggacctcaatctgcaggaaaacttatatgcaggtggatattacatctctatccatgatttcaccgatacggtaatgtccataatcaaccgcatcttctcgggcgaacccgcatcatccatcccttaccaaaatggcgggactccacaaacttatctgaattttgccgatctgaagtggtgtaacatatcggaaaagttatatccggaagatgccatttattacttccagcctcctactttctaccaacagtataagatgtacatctggatggcagtcctgttcatcatcttatgcatcactctctatatcttttattctattcattcccggaaaaataaaaaagaactcattctggccaaagaacgcgccgaagaatccgacagattaaaatccgccttccttgccaatatgagccatgagatacgcactcccctcaatgctatcgtcggtttctccagcatccttgccgaaacggcaaatactccggaaaaccgtgaatatatccggatcatcgaagataacaattatctgttgctgcaacttataaatgacatcctcgatttgtccagaatagaagccggattactgaacttctgttatactgatatagatatcaacagttgcatccgtaaacttgaagatacgtctcgcctgagaatgcctgccaatgtgaaatgtattgcagagttcggcatgaaaagatgctatatccataccgagcagaaccgtttgatgcaagtactcggaaactacgtatccaatgccatcaaatatacgtacaaaggaagtatcaccatcggctattatccaccggaagatggaaaaatacgtttttacgtccgggacacggggtgtggtatttcccaagacaaacagcaagccattttccaacgttttgtaaagctggataacttcaagcaaggcacaggcctcggtttatctatctgtcaaatgattgccgaaaagatgcatgctaccgtcggagtatcttccgaactcagtaaaggttccgagttctggatagaaataccttaccagccaattcgcactatttattaaaaaggaagaaaaaagaatggaaatcttttggtaaaatcgaataagtctttatctttgcaagcgaaataaaaatgtaattattacaagtttgaattaaacgaatatggaagtagtagtagaacgattgcaaggacataacattaaaccctcggtacagcgtattgctatcatgaaatatcttatggagcaccgcacacatccgacggtagatgagatttatacggcattatctcctactataccgacactctcaaaaactacagtctacaacacgctgaagattttgagcgaacaaggagccgcacaaacgcttaccatcgatgagcgtaacacatgctatgatgccgacaccactccacattcacatttcttgtgcaagcgttgcggaagaatctatgacttgccgtgtgacgatgcaataaaaaaagtggtagatacggatatggatggacacgaagtgcaggaaatccattattattacaaaggaatctgtaaacaatgtaaagaagactaacgttttttataaaacgaacgaataactaattcaattaaatcaaaaagaaaatgaaaaaatttagatgtactgtatgcggttacgtatatgaaggtgatgccgctcctgaaaaatgcccgttgtgtaaagctcctgccagcaagttcgtagaagttgtagaaaccacagaagacggtcctctgtcttttgctgacgaacacgtgatcggtgtagctaaaggttgtgatgatgaaatgattaaagacctgaacaaccacttcatgggtgaatgtacagaagtaggtatgtatctggctatgagccgtcaggctgaccgtgaaggttatcccgaagtagctgaagctttcaagcgttatgcttgggaagaagcagaacatgcttctaagttcgctgaactgttgggtgactgtgtatgggataccaaaactaacctcgaaaagagaatgaacgctgagtcaggcgcttgcgaagacaagaaacgtattgccactcgtgcaaaagctctgaatctggatgctatccatgacactgttcatgaaatggcaaaagatgaagctcgtcacggtaaaggctttgaaggtctgtacaaccgttacttcaagaaataatcctttattagtatttttaaggaaagaggttgccattctggtaacctctttttctataatacaattcattctctctctcaagttatcccacgaaatgtaacacatcatttgctatacgttacatcccgttctataaagggtttttcccccatgttatgtttgctaaaacatctgttttcgattacttttgcatcacaattgctaaccccaacgtaattatgaaaacactattatccatcttattccttttctttgcaacctacggatacagtcaatcagagaaactatttacggtagaccgtgaattatcaaacagcaatatcaatcagatctatcaagctaaagacggagtcatctggatagccaccgaagacggacttaatcgttacgacggcgccaagttcagtgtatacaaacacaaagaaggaaacgacagctcattggtagataacaatgtacggatactcttcgaagacagcaaaggtaacttcctgataggcactcaacgtggactacaactttacgacccggcaacagatctctttaaagaaatacccatcctgtacgaaactggaataaacatgagcgcacatatcagtacgatcctggagcgtaagaatggagagttattaataggaacgtccggccatgccgtttattcactaacattaggaggaacagaacctcttatcaaagaggcgcaactgccggttcccagttttttcatcacctatctattcgaagaccaaaacgaaaatctatgggtttctacagaaggaaaggggttataccgcattgacacgtcaggtcaaatatatcactatttcatcggaaaagagaatgcctggaatatagtcacttctatttgcctggatgaaaaagggaatatctatgccagtaacataaacaaaggaatatttgtctacgaccagcagaaagatacttttatccctatctcctgtccgatacttcctagcctgcctatcaatacaatatatgctgccgggcaaggaaaaatctatatcggaaccatagggtacggcataaaagtatatgacatacatacacagaagataaaggaaagcgagttcagtttcagtactttcgatttcagcaaagccgatgtacatgccatcacaaaggatcgggcaggcaacttatggctgggtatcaacggcaaaggagtcatgcttcttccggctacaacaaaccaattcaagtacatgggctacaaatctgtaacaaccaataaaataggttctaacagtataaaagcagtatgtaaagacaaggaaggaaccttatggcccggaacagccaatgacggtatatatggtataaaaggaaagaataagccttccctgcactttgagcacaaagaaacatctaattccgtgccgtccacaatcaaccatatccaccagacagcagacggcagattgtggctggcctcacctttggaaggactggcagaaatggaccccaagaccggcctgtgccgatactataaattacaggaccattatcagaatgaagtaaaaaacatatcgtatctgacttcagacaagaacggtgaacgattatgggtagccgttatgggcggaggcgtgttttacatcgatctaaaaaccgggaaagtcaacagatgcgatacttttgaaagcggaaaagaatatcaggagaattacaatgtactccacaaccgttgggtagcctcattgctgtacaccagcaacaataagttatatatcggcacctacgatggcttaggatgtctggacgtacccacaatgaacttcgcctcaacctatgggaaaaacaggatattcagcggcagtatcatactgaccctctttgaggatgaacaaggtgacatctgggcaggtaccaccaaaggactcattcatatagacggaaaaaatggaagctctaaaacttatactacacacgatggattgcccaataataccatttgtgccattcaaggcgacaaacaacatggattatggataagtaccaattacggtatcacaaacatggacccggaaacaggtacctttatcaactactatgcaggcaatgggttacaaggaaatgaattcagcaaaaatgcagcctgtacagataaagatggatatctcatctttggaggtatcaatggtatcacctttttccgaccagcagaaatcactacagaagtcaaaaagcccgaggttagaattgccgacttctacatccataataaagctgtaaagaaaggtacacgttccggtaaccacgaagttatagaaacagcagtacaggaagccagccggttccgtttatgtcatagagacaactcattcagcatcgaattctcagctatggaattctataatccggaacggatcacctatctttattccatgaatggggcaacctgggtggcattagcaccgggcgtcaacagagtttctttcagtgatctggcaccgggtacttatcacttcaggatgaaagccaaagactatacagcctactcggaagagaaagaaatcatcatccagatagatccggcatggtgggcatcgggttgggctaaattaatatacgtcctattgatgttatcaatcatcggattcattgtgatgcaggtgcatcatcgttaccgtatgcatcaaaagatgttgcaacacatccatgccgagcaaattaacgaagcaaagttacagttcttcattaatatctctcacgaaatacgaactccgatgtcgcttatcatcagtcccttgcaacaactgatggcaaaagataaggatgcagaatgtagaaagctctacagtactatacaacggaatgccgagcgcatcctgcaattggtaaaccaattaatggatatccgaaaaatagacaaaggacaaatgtccctcatgtttaaaaaggctgaaatagttagtttcacccgtgacttgttagaaaccttcgaacaacagacaagggtaaagaaactcgacttaaaattccacacctctgctcctgaaatagaaatgtggatagatcctaagaactttgacaagatcatcctgaacctactgtcgaatgcttgtaagttcacacctgaaaacggacaagtggaaatcagcctcagcacaggtgaggatacccaccttcctcaaaatgcacccctgcgccgatatgttgagcttacagttgcggacagtggtatcggcattgcttccactgaacgggagcatatattcgaacgattctaccagatacgcaacagtcagaacaactcaaatataggaacaggtatcgggcttcacctcacgcgctctttagtggagctgcattacggaaatattcacgtagaggacaatggcgaaggcagaccgggctcccggtttatcatacggctaccgctgggaaacgggcatttgaaaaaggaagaaatagaagaagcaacaaccgccggcaccctaataaatatcccggcggcagaaccggctaccatagcttccccgctgccttatgatgacgatgaagaagccagcggtaaagtccgtgcccgcagtcgtcgccatgtgcttgtggtagaagacgatgaagagattcgccactacatttgccgcgaactgagcaatgacttttacatgaccgaatgcagtaacggaaaagaagcattagcatcgatattatcccatacgcccgatctgataatcagcgatgtgatgatgcctgaaatggatggcttgacactctgccgcaagatacgacagaatgtgaacatcaactatctacccatcatcctgcttaccgcccgtaccagcgaggaggacaatctggaagggttggataccggtgccgatgcttatctgatgaaaccattcagcattgagttgctgagaaaaactgtcttaaacctcatccgccgccgggaacaattgcgtaatgctttcagtggccgtcagaatcaggaggaacaaatctcaatcccagaagtaaaatctcccgatgaccggcttatggaacgtgtcatgcgcgttatcaatgagaatttaggcaatccggcattaactgtcgaaatgatcagtacggaagtaggtatcagccgtgtacatctgcatcgcaagctcaaagaactcacgaatcagactacacaacaactcattcgtaacttgcgtctgaagcaggcagctaccctgctggccgacaagcggcatagcataacagaagtagccacattaaccggttttacgcatcccacgtacttcgccacggcattccgcgaaatgtatggcatatcaccatcagagtatatggaacgccatatagggcaagataaaacgaaagatggcatcttttgatgtgaaagatgccatcttttacatagctattttaaagttcttgtccgagggctttccgttaggttaagcctgccaagcatatcgcctccgcaatctactatgatcttatgcaatactatcgccggactgagagggcgaatagtcagagtatgtaccccggcctccagagtgacatcaggaaaagttacttttgattctattacccgtgccgcccccgcaggatacatttttgaataacagttggcccaagttaggtctgaattgtaattcacgatttgttcctcaccgtcatctaaacgaatggcataactatgccctcctttaataaaaggcaaagtactatccaatatcaggcgtacacgcacaccggacaagtcagactttaatcgcatttgataggtcaacgaagcaccggataccggcttggtatatggcatcaaagaaagtccggagagtgtacgtcccaagtccggtataacagtccattgtgtaccgggttcctgcacggatgtagcaaaacgttctgcttccattaccactaccccactgctctcttcgtattcataaccacccattaccatatttccgttccgggaagcatccacacgggttactttcggcattatatttcctcctttcggttcatcccatgaagtatagcctatatgggtctgatccatcatgtgtttccatttgccaccggcaatattattattataatcggcgcatagttccgcatctctccggaagcaatactctacgcgatccgcccaggcattggcacgtacatcattttcagcagccaactgccggttcatggcggtagcacagtacatttcataaagattggccatagcttgcacagggaataatatcagctccttataagcatcgcgcctattctccggtagcaaagcaaactgacggacagcatgtgcttccaatgccagaaactcatcggccacagctttaaattcaccactttgcaaattataggttttgtgatctaatatctctgccgtcacacgagcgcaatacttacaataaagatttaaaattcgtgcagcttcgtcagcatattcattaccaaattgctggcggcaaaattctcttgtataatccatcagattacccgcattaaaagcatcaggattccatgccattttcaagaagaaatccgtaggaaactcattcggtttcaaatcacctacattcaatatccacatcttatccacaccataagcatacgtcagataaagctgttcccacatatgctggatttgagtcatattcaaccactgataagcacgcggagcaccatgcaaatccacatgatagtacatgccataaccaccgggatgacgtttaacacccggttcgggcagacggcgaacatctccccaattgtcatcacataacagaatcattacatcatccggtatctgcataccttgatcgtaatattccagtacctcactataaagcgcccataattgtggagtcttagaagcagattttcccgtaacctcggctatgatacgacgctgttctttcactatattttccaacagttttgtatccgtatcaggtcccatcggcgcatcaccgtcaccacgcatcgcaatggtcaccacttcttctttaccccgcatgcgctctataccttcacggaaaaagcggtcgataccatctttgtttgtctgatagttccagtctccatacactttacgattgcgagcatactcctgatggttacgcgccataggctcatggtgggaagtaccgattatgatccccatctcatcagccaatggactgttcatgggatcatccgcatagaaagcagcactccacatagcaggccataggaagttggctttcaggcgaagcaacaattcatacacatgcacgtacattttactattgaagccaccataacgttccgtggtccaacctcccatgcaaggccattcatcattaataaaaataccacgatacttcactgccggttctccatcggtatatacacctttttttatatagagttcctcatgccgttccgccggaacatccgcccaccaataccagggagatacccctatctgacgggataactcataaactccatagatagttccacgcttatcgctaccagcaattaacaacacttcacccggtattccttccaccggatcttttactgtggtgattataaacttctcattcttgcctttcaactcgcgggcatccagtttcttcgatttcaccaattgctttatgaatggagactcatcaaaagaaccaataagaatacgtacattttgcccatccgcacttcccttctgttttgcatcggccactaatgcaggacgtatatcggccactttataaaaatcctcctgtaaattatgtacagccgttaatactcctttatgttcctcatcagcacataaaatactgaaactcctttgttgagatgttacaagctccaacgtaccttcttcccgaatgaaagagacaaacttatccgccgcttgcagtgtcgaagccagagtgagacaaagttgcaggcagacaatccgtgtttttaatgatattctcatcatgtagaaataaattagattaataatactatgaaacaaaggtacacggcttccagaagcctgccaaagatcactgttacagatactttcgagcatattacgagttaaaagaataaggttgtgttacatcaattaaagtctatgatacacccctaatatagaatgcaacatcagttaatctttctgcaatagcaacatatttattactattattatacttcccctcaaatccgcaactaagcccttcaacgtccttcttgcgtgtacaagtcctctcattactgaattggcagataaattgaggcagaaacacccaaatcagcctacaatatccccttaccccacaatgcgacttgaggcaatacgcagtatcatacccataagttgtaggcgttatccaaaatctgtctgaaatacatccgcgtaagcattgttacaggtatagatattcagcacataccgccttgatgtcctggtccactttgctggtacagagacatacctgaagacaaacgcttttatgcggcttgttgcattgagtccgaacctctttacgtcaagtctgtggataatggccttgtagaagttacgaacaagtgctgtaagaagaaggaacacggtgttctctgccatgaaggatttgggcaatctgtcccacccaaaaccattgttcatatcatcgaagattcgttcctttcctccacgaaggttatagaactcgacaatctctcttacggaagattcatagtcgttagtcaggatacaacggtatgtgtattctccttcccaaagatcctgcacaccatccatccgtttctgtctttgaatcacgagtcggtatgctttacccttccacttatcaacaaggattgagttcaattcgaactcaatgccattgatttcctcagttttccaacctctgagagcaaagatgtcattatagagcgaactgcagcggttagcacggatatagaaggatttgcagtgttcctctacttcttctacgatttcctcggaacacgatccacaatcagctctgaaacgattgatagtaaggccgttctgttcaaatctctcaaagaatctcttcagcgtgtccttctgatgaaaacggacatttgtgttgccatcgctattctctatgccgacaatcaagtcgccaataatcgccacgccagggcgatagccaaggaacttcttgtatgtaggcttggcatcatacttctctgtctctatgaactgatggtcgaaatcaacatcatacatctcaccctccttcagttggtcagatgcaaacatacaattgagcagtaaagtattgagagtgtcagccgtgttgaaatcgtagttctttcccatatctgatgtgtatgagatgttttcttgcgtcagctcctttatcgctctgaggatagtgtcagaactacaagtacgaagtgtcggatgaagtgagagatggttcatcaaatgagtagtgacatcctcaatacatgagccaccacagaagtagatactcatgagagaacggatgatttcgctgtactgataaccgaacgatctacaccttagaccgagggtcgagtcgattacagatgacaatgtggagtcaaattgctccatgattgaaaatattcctccaaaaggagtgagtttctcagatttaatttgtatttttgccatgcctgatgaggttttgtttgattattatagcaacactaaattaagtgaatcctctgacatggcaaaatcctgggcaactttttgttgctcaggtacttaaaaagtttaagttataatagtgttgcggaattaaggtttattagaaatctatgcatttttctgatgggaatgtcatgttgggcatgctctgataataataatgcggagactgatgataacgggaagggcgcatatgcgctcttcctaaaaaagtcaattacagtgagtgccggtgaaaaccagacagaggtcgttatagagtgggcaaaaacctcctgggagataaccttcgaacagggagatattgtaaaaagtataactccgatgtcaggtggaagcagtgatggagaaaagcagtacacaaaaattcaagtggtttgcaatgctaacgcttcaatgaaacaacgtacacagactattcacattactgacctaaccaacaagcagactaccgatttattgatagaacaggaaccggcattcaagtctgttacacttaatattgaccctacagtaaaatatcagccgatagcaggattcggtggaatgtacaatcctaaaatttggtgtggcggaaacctcatttctgcccgacaattagaccaaatgtatggtgaaggcggattgggctactccatccttcgcctgatggtttatcccaacgaatctgattggaatgctgatgtagaagcggctaaagcggcacaggccaatggagcaatagtttttgcatgtccgtgggactgtacagatgctctctccgagcaaatcaaggtgaacggcaaagaagtaaaacatctcaaaaaagagaactatggagcatacgccgatcatcttatccgttacatcaatttcatgaaacagaatggagtagatctttatgccatatctgttcagaatgaaccggatatggactttacttattggactcctcaggaagtggtagattttgtgaagcaatacggtgccaaaatccgtgaaaccggagtcagactgatgtctcccgaagcatgtggcacaccacccgaatacacggatccgatcatcaatgatgccggagcatttgcacagaccgatattattgcaggacacctttatcaaggttttacagacctggataatggatacgtcaaaaatcgtcacgattacatctgcggtctctaccctcgcatccatggaaagacctggtggatgacggaacatctctttaatgacggagaaaaatcagatgatccgtcagcatgggaattccaaaagtggcaatactgcctcaaccaccttggcaaagaaatccacatgtgtatggagggctattgcagtgcatacgtatactggtatttaaagcgcttctatggattgatgggcgataatgacaagcgcagcccggtgggtgaaggtgaaattgctaagaatggttacatcatggcccattacgcgcagtacgccacaggtactacccgtattaaagctgtcacgaataatacaggaatatgtgccacagcctacatcaatgaaacaggaaatgaagtaacggttgtattgctgaatttcaccggagccacccagtgtatagaaataccgttggcaggaatgaagcgtgcaaatgccgttgaaaccaatgaaaacaaaaatatggaagttatcagtactgagatgctggaatctggcgagggtgtatatgtactgttgtccggtaacagcatagtctctgtccggttgaccttataattgcatgaagtgatatggaatcactcaagtagttcagattctctccaaatggtaagtgttgccaaagcaaaacaaaaaattgctttgtgcaacacttttttttatttttgatgtcacgttcgctttacacgttcgtcttagtaatgtaaatggaactcaaacaatttaaaatatccgttctacccctccgcaataagctattgaattatgcgcggaagttgaccgaaagtccggacgatgcagaagatgccgtacaagaagtcctgctcaagctatggaacaaaagacttgaactggaacagtaccgtaacattgaagcattcgccatgaccatgacacataatctctgcatggatatgtggcgcaccaggcataccgccagcgtaccgttagagtatgtacaggatgccactcccggtggaacaccggaacggttgcttgagataaaagacgaaatccgtctgatgcatgaaattattaattcattgcctaccttgcagcgcaccatcatgcggatgaaagacatcgaggagtatgaaacggaagagatcgccgacatcacaggctgtaatccggaagccatccgaagtaacctgtcgagagcgcgaaaaaaagtgagagaaatttacctgcaaaccgtacaagaaaaaataaggaggaaacaagtatgaagatagaagaattaatagaccgctatttcgaaggacagacctcatgtgaggaagaacgcgaattacgcagtttcttcacgcaagaaaatgtaccggaatcgttacaagtatatcgtcccttgtttgtctgcctggatcaggaagcaaaagcattccggcaagaaagtgctcctgttaaaaagccttccttccgccgtcgctttatttacacaacgggaggaatagcagccggaattttattagtgatcggcattgccggtacgcagcgataccttcaccccactccggaaaattacgtcattatcgacggcaagcaatacacggatgtaaacctggtgcatgaacaagcccttgctgctttccgagatatgcgaactacggaagatgaagtgcttgatctgatgtttgaataataaaaagaactaatagatacaattatgaaaaagttcactcataccctgctatgctgcctgctgctcttgttcagtaccggcatgtatgcccaaaaaggactgcaaatagcatccgtatttcagaaatacggcaatgagaaaggggccacttacgtggaactgtccaagatgttatccaagaattgggacatcacccattaccaaagcctgaaactgacaaaggcagaaaaggcattaccggatatctaccggtgtctggaatccgaccgggaacatgccaggaaaataaaagaagtggtgacagacgggcatattcaatcgggatactaccagttgcctccggtaaaagataaaataaaccgcttcatactattccggctcggcaagaaaggagaagccacacttatctatatcgaaggcgaaatagacagtgacgaccttgttacactgatattcagcaaagactaattctgaaatttataaatcacaaataataaaacttatgaaacgaattttctttttattccttatcatgacttccatgacagtcgtggcacaagaaagcatcccgcaagatacaactctctatctcaacggacggaagatcatcattaaagaacatgatggcaaaatcaaagtgaaaatgtatgaggcgaaaaccgacaatgacaccatcgaaaacacccaggtatttgaaggtgtgtatctggacggccgcagcattgaacgaaccacaacggtttccgtacctttcgtgaagaagaaaaaaggctattaccgctttgatcctcactaccctgccatctacttcggctttaacaaactggcaagcaatacatttcagtactctgccaaagtacctcaacttggctcgaaatcctgggaatggggtatcaatctgtttaataccggagttgccataacccgtaacaatcattggggattgaccaccaccctcggtttagcacgtatcgtctataaactggatgacaattacggctttgagaaagtagacggcatcaccgtttgccggcaagccgaagatgtggattaccaaaagagctggctgcgctattgggctttccgtctgcctgtcagtctggaatggcaaagcaaattcggcagtcgccgtgctttcattgccgctggtccggaagtggaatggcgtgtaggggttaaatccagagccaaatatgatgataagaaacatactttgagtagcaagctgaatacccatccgcttggcatgaatctgctgctacaggctggttacggttgcttgggattcaatgcccgtttcgctctcacttctctgtttgaaaagaataaaggacccgaactctatccggcttctataggcataggttggtattggtgacagcataaaactttaataattcatttcccgcctcacaacaaaaactgtggggcggacttgtttttgtctatatagaattgtatctttgtatcgctactcctttaacagcaagaaaggaaaaatagaatgaaaacaactaatgaaattctcgccatcctgcacgagttcaagcaaacaaccgctgacaagtacggcattgagagtcttgctctcgttggttcagctgcccgtggcgaacaacgggagaacagcgatattgatgtttgcgtaaaactacgcaaaaccacctttcgtgcctatatgacgatcaaggaagaattagaacacctctttcatacaaaagttgatttaataaccttgcatgagaacatgcgccaaatgttccggcataatcttgaacaagatgcaatctacgtctaaacaagcattaatagatatgcttcgctttgtagaaagccaaacagcattcatcatcaaaaccactgttcggataagcaattatcaggattttctcaattcagacgatggcatggtattattcaattcgacgtgtatgtgcctgcaaactattggtgaaacgatccgacaagtagatgaccgtactcacggatgccttttctctcattatcccgaaataccgtggagacaaattataggaatgcgtaatataatctcacatgaatatctctcaatagatccggaattgatctacgacattaccagcaaagaacttcctcccctactcgctagtttacatcagattctcatagatattgatgccggtctacgaaataaggagttgggggaatagacatcattcgtatcatacagagaattaaataatcatttttattatgaccaaagaagaacttatgagaaaagcgattgagctctccacggagaatgtcgctaacggtggcggcccatttggtgccgtcattgccaaagatggagaaatcatagctaccggaacgaatcgtgtgacatcctcatgtgacccgacagcgcatgccgaagtcagtgccattcgtgcagcagccacgtcactaggtactttcaacctcagtggttgcgaaatctatacctcttgtgagccctgccccatgtgcctcggcgctatctattgggctcgactggacaaaatgtattatggaaacaataagactgacgccaaaaatataggtttcgacgactctttcatatatgatgaaatcgctttaaaacctgccgatcgcaaactaccctcagaagtattgctacacaatgaagccatcaaagctttcgaagcatgggctgagaaagaagataaaatagagtattaagagcctgtcgacaagaagttaagactttgtttgcaaggagttaactccttgtaagcaggaagtaaacttcttgtaagagtatatttcaatgaattataaaacagtaaaatccctgaagtctacctttgacagaacttcagggatttttcatttattctttatctaaaaacaacatagacacaatttttatcaaatctagtattgtgctaaaggaattatcccaagtttataatatccagaattatatttaggattcagagctggttcataaataggacaacgatattcaccacgtcttccacaataagtaaaaccgacactatccatttcattcttaatgataatatcatcaccaaaattaacaatcacatcctgtaattcatcgctatctaaatacgttgttaccgtagtagaaactcgatgctgtactgtagtagaagtaccaaattttgctccaaccttcactttttcctctaagcctaaatcaaagtcaaaattagtagcgaaagtagtagtagtttcaactacattttgagtcgttgtctgtagatccttttctataatagaaatctttattgaagttgaataatcttcaatattccaatcaaataaaggtaaaggctctggtaaataatacctttttatacttttaactcctttaaccaaataaggcattctgtttccctgtgcttgtaaatcaagttcaaataaatcatagggtggaattgatattgcttttattatctcatcagaaaccaaattcttgttactaacataagttttcactaaaaattcataatttccattataccaatatccttcaggccctctaggaaccggatgatctcttgttgattgaggttgcttgtcataatgatgcggatcatcaccttgatctgaaatattatgatacacgacatcagggattcctgttagctcaagaaaatacacacattctgatatttttttttggaaaacgcctttaccatctttcgtcataatattataatatacataatctctttgccaaattccattctgatctgcaaatttctttgcatcaaaaactttttgaagttgcgttggaatatccagaggggaaactctagtcttcactttagtaagattattgaattcctcatattcaaacacaaaattcaagccattttcagcacgcacaacattagcttctttaaaatttcgtgttgaagcagaccgcaatataactctttctgacggtttcacgacaacaataggaaatgatggtatttcattactcttaatagtatttacctttccagcattatctacaaaaagaatttgattctctttacttttataagcaacaaaaggtacttcttgagcaacattccacttttctgccgaaaagatatcattaggaagtacgggaacaaaaacagtcaaagtaggcatttccttatataaagctagcaagttctctttactcatatacttcgataaaaactcctctaatgttcctcccccgcttaactttttatctttaactaacatatacaaaacatcatagtcataatcaaactgctttatcgcctcttcttttataagctttcttacgccttcactttcattaagaactctagccaaagcaaatgaaaattcactttttaaagagtttaggtctatttcatcataactttcttcaattaatgatgaattattacttgtttcaatcatatcattagaacatgatcctacaatgaatagagctaatagtagtcctacttgtttcaatctaatattcataatattaatcttttaatagtaatacattaagtctcatataattctgcagaactgctataaagataatgtttttattttaaatatatatattttttagtaaattcttgtttaaagaaagcaagaaagacatcattaagcagccacatacaaccattttaacaatttatacaaataccaccataaattttcgcctaatttatagcaatataaaaaatccccaaagtgctgtgatgcagactctggggatttagttaatacacaaggtatttgcaatgaaaggttatttgcttatattgttactcttttagaagcgcatacctaaagtaaatatcacttgactacgtgtgtttgtcacttttgtcttatttagatattcatcatcaaaggcataaaaatctgatttgtaagtactatattgatacgccaaatctgcataaactaatgaaccacgataaccaatacctaaagtgtaattactcttggatttagcattagcatagtccgtatctgtcataacagagttcagcggcaaatccttatatgctccgtctttatatgctgccgtgctgtaattgtatccagcacgcaaagcaaactcaggtatcaccttatattctgcacctatgcggaatgtacttactcctttcagcatttctttgattgtagaattttcataccccatctcatccccttcaggataataaagacgtatacttgagtaatcctgatattcatattcagcaccgagagcaagatttgtacctactgtatatcctaaacttagattgtatttccatggagtacggagttcataatcataagtcatatctttgttatccaaaaaatcataactatctactgttgttttataaaactcagtttcccccttatcattctgcccatagataccagactcaagaaaaacattagtagccaaggtcaacttataaaatgtaggagtatgtattgcaagtccaatacgcaaaggagatgtttcaaaaggacgtatgattgctcccaatttaaaatcaaatcctgttccgtcaatctttgtccagctatttaagtcataatattcccctgtgtcataatcctcactataaatggaacttttggtataattcaagtcataagcacctacagttactcccaaatacaccctatcattaaagttgaaagaaatattgaagtcatattgatccaccccaccagtttcacgtgatctgaacttactataaggttggggaagaaaagcaccaaatcctgtcaatctgtctttattattcacatcctcatataagggatcataaagtgagccaccccatcctaaagcagccaaccaacctacattattattattaaatacattattattaggagtagcattatcatctatatattttatatcatacccattttccaacattcctccagcttgtgaagccatcaaaaaagtttgcgaaacaacctgcccgtcaggtgtcagattaagcaacccctccattgacgtcgttttattaaatgatttggaacggttatagctgaaaccgaagtttacatatcgcaaggtggtctcattaccaattttattagaaagtacaaaaccagcattattcaattgccagcgattcttatttgaattgaaagtattaccaccatacgtactttctgttccggttgatgaaaaaccaaatgaagcagtaacatcattactacgataaatacctatacctgcaggattagttgcaatggtagacatatcacctcccaatgcccccatggctccgcccataccaacaaaacgagctgttccattcaaatccttctctgtcatctttgtaacatcatatatagtctgcgcacccattcccattgagacaagcaatgaaagggcgactaaagtcagtttcttattcataatcaatgttctttctagttcaaaactattattacattcacgtatctgtttatcttcttccaccgcctctactggaagaaccgcctccgccaccacttgaacgggtagaacctccaccactacctgaagaatagctgccgctagagcgtgagctaccacctgctgaatagctgctagaagaacgagtgctggaagaagaacgattatagtcataagaacgactactggaacgagtacttgcaccattgtcataattacgtggagcagatgaactaccgcggttataagttgacgaactacgtgtactactactgcgtgtactggtaccggaaggacgaaccgcagaattaccacgattgctactactacgtacactttgcacattgctattgtatgcaccactacgagtgctactcggacgagtatatgttgaacgacgtgatgaagcagcgtctgtccgtgtactcattcccggacgttcggatgaagcacgggtccctaccacacggcgagttgaacttgtaccagagcttcttctcacttctccacttgtagaaccagcactgcgtcttgtttgatagccacttgtagaacctgaagatctccgtgcagttgatgaacctgatacacgatttcctgaggacactctatttccataagaacgcctgctcgtataaacattattgttgctccaatggttgcctccccagtgtccaccgccaccgggataccagccaccgccaggataataatgatggtgatgatgtccccatccccaactccagccaccgtagaaaccgccccagccataggaccagccaccgtaactgtaataaggtgagtatccaccccaaccataataaggatagcctccccatccgtaggagttataacgccaatcccaccataagcggttagagaaagtcgggaaagcatacgcatacattccgtcggtataaacgttccagtcccatgaattcagaccgtaaacgatatcccaataatacgggctactgatgctcaccgcataacgcgggttgcggaaacgtacgatacgcatagcatattcataatcatcttccgaaccatcgaagccatttacccattcaccatccggatcgggcactgctttttcctttatatataaggtatcatcttccattacgaagtcattctcacgagaatcataacgacggttatattcgtctacatcacgtgtatttcctttacgatcctgtactacaacagtagtattacccggcgacgtataaaccgtagttggtgcattcgactttactacaatttcttcagtcggagcagaacttgtaactttcttctcctgcttcttttccttcttatccttagaaggaatgtagtaaaggtcgtcatctatgctctgcgccgaaaccatccaagggaggcacaaggcaaaaagcgataaaaaaacaatctttttcatatgggtgtggtttataggttttacattaatccattttatcacgtcacaaagatagcgatggattttaccgcatacaggagaatttccccaaatgattatagggatttccctattctatcataacaaaagagatattattttggttttcaatgcactaaattaaatctccagtgcaagtttataacacatgaaacttatccgtttgacggatataaaatgccggagaaatcagtgcgtgatatttggctatctactgatgagataaaggctatacgagatgtaaaagtcagtagggagaatctggttaggaagtatctccggaatttgtatatgtttatacattttactatctgatctttttttattacttttgcagcaaataaacgaacaatactaaaaaacaatgcaagacataagaaagcaaaacgtatatgaccttgcccaagaaagattacgtgtcatttttcagaattttgataatatttacatctcattttcaggaggaaaggatagcggtgtactattaaatttatgcatagattatatccgcaaacataatttaaaaagaaaaattggggtatttcatatggattatgaaatacagtacaacatgacaattgattatgtggaacgaacttttaaagagaatcaagacatcctggatatatatcatgtttgcgtaccttttcgagtaacgacatgtacgtccatgtatgaagattattggaggccatgggatgaagacaaaaaagcagtctgggtacgccaaaaaccggagagggcaatgacattacatgagttccctttctacactaccgacatgtgggattatgattttcaaatggaattcgcccaatggctacataaaaataaaaaggctacccgaacatgctgtttagttggcattcgtacacaggaaagccataatcgttggcgtgccatttacagaaaaacaaaggaacgatatgccaactacctatggagtacccaaattactgaaggtgtttataacctctatcctatttttgactggaaaacaactgatatctgggtagcaaatggtaaattcaagtgggattataatcatctgtacgatctttattatcaagcaggaattagccttgaccgacaacgggtagcaagtccttttatctgcgaagccatagagagcctgtcactgtacagagtgattgatcccgatatgtggggacggatgattggccgggttaacggagtaaatttttccgggatttatggaaaaaccggagccatgggaagagatgagatacatttacccaaaggatatacatggaaatcctttacagagtttcttctgtctactctacctgaacatacccggaacagataccggaagaaattggagacaagtatcagattctggaagaataagggcggtgtactcagtgacgaagtgatacagaaactaagagaaagaaatattcctattcaagtaggagaaagtacaaactacaaaacggacaagaagcctgtcaggatggattatttggatgatattgatattgcagagttcaaggaaattccgacttacaaaagaatgtgtatctgtatcctacgcaatgatcacgtttgcaaatatatgggattcgcactgacaaaagaagaaacactcatgaaaaatatggcattaaaacaatatggaaaaattttcaaagatgaatagaatttcttaaatgccccatctttaaataagacaaactgcatctcagcataactttttcatgcaagcatgaaagttctacattcgatttgcattatctttgcagctaataaacaaatatacaaagaaactggttcgcttcgctaacagaggctttgcatttaacaataaattatattccaatgaaatatttagaatttactttccgcacttctccttgtacagaagtagtaaacgatgtgctttccgctatcctgggcgatgcaggttttgagagttttgttgaacaagaaggcggtattgctgcctatatacaaaaagatttgtatgatgaaacaactgtaaaagcagctattgacgagttccccctaccagacacccaaatcgaatatacttttacagaagccgaagataaagactggaatgaggaatgggaaaagaacttcttccaaccgattgtgattggtgaccgctgtgtcatccacagtactttccaccatgatgttccccaaacagaatatgatattgtcatcaatccgcaaatggctttcggtacaggacatcacgaaaccaccagtctcatcatcggtgaactactggacagtgacctacaaggcaggtcccttctcgatatgggttgcggcacttccatccttgccattcttgctcgcatgcgtggtgcagaaccttgtactgccatcgatattgatgaatggtgcgttcgtaactcacttgaaaacatcgaattgaaccacgtagacaatatttccgtattccaaggagacgcttcttcactggaagatataggtccgtttgacgtagtcattgctaacatcaaccggaacattctgctgaatgacatgaaacagtatgtacgttgcatgcgcaaaggttcccaactctttatgagtggattctatgtggacgacattcctctgatccaggcagaggccgaacgtaacggattacactttgtacaccatcaagagaaaaatcgttgggcggcagtgaaatttgaactttaaagcctacttgtcccgggtagcatctacccgataactccggctgatgctacctgctcaattatggacaaaaaaaatcccgacaagacaataattgtctgccgggaaccagtatgaatattatctcacttaaacagataaatgcaatctaaaatatttcctcatgaaccatacataaatgaagctgagcaataaaatagcacataaaagatacaagtatccccaattctgacaatagatatatccgataatcactatagcctgcacagccatataaaccaacgaaaccacaacatgaggtattttcaactcatttgccattaactgatacatatgtttccgatgtggcaagcctatgttttcatggagcatcaggcgatgaataatagtcaaaacactatcaactccgtaaactgccaaaagaatcatccaactgaaatcctccgttttcagaatcaacttccctatcaggaaaagcagtatgaaagcgatactcacagaacctacatcaccggcaaaacacttcgccttcctgcggaaattaaagaagcagaataccaccactgaacaaagcaccgtataaattaaagccggttcagcaaaggataccatttcttcattgatataagccaatgctcctaaaataatcaatgaataaccacctgtaataccattaatgccatccatgaaattataagcattgatgatacctgtacaaacaatcaaagctataatgatccaacaccaggaaagcgaaaacaatccccattgataaaacatcaaggccatggcagaaaagtgaaacaccagccgtaaaccttgggaagtagaacgaatatcatctacaaagctaataaatgttattaggctcagtgccaatataaaccaaggatattcccagtcgttagtcaggaaataagccaaagctccgaaatagaagatgattccaccaccacgcaaagtaatccgtgaatgagaactacgttcattgggtttatctatgatattaaatttatcagccaccctaaaataaaaaagttctgtcaggaacaacagaaccaaaataattacgtaatacattattcatttttattaatccaatgaaaccatacctgaacacagacaaataaaaaagctgctacacttactacagccattacaatccaaaagcatatactcattctatcttgaaattttctaatacatttgttggcttccaccctaattcccgcattgctttctcattactaaaggttagcgacttggttattttatcaagcttcaatgaatttaatggagctttcttacccaagcagtcccctatcaaagccatgccttttgccagccaataagggatcgataaaggcagcgatttattcatctgtttacaaatcagtgtttccaaatccctgaatgtaggttgataactatcacatacattatagatacctccttttctaaccagcaaaggaatcaggttcgcaatatcttgcaccatcagtacacttttccgagctctaccatctgcaatactgaaataccttcctctacgaatccctgttatcatagctcccaaattgcccggaggattaggcccagctatcaaggaagggcggattatccctaacacaacattgtatttccgacaccaattctgcaaatactcttccgccaggcgtttactcatagcataaggagtggttccatttagcggatactcttccgtgatattcactccataatcgcaaccgtacactgctactgtggaaataaagataaaagctctcggtactccaaccttctccaacgccgcacaaaggtttttcgtaccctgtagatttacatcgaaaaatgcctgtcgttcagcgtccgttttaggaatagaatgggcttttccggcagcatgtaatacaatatcatagcgttcgtatagctccggaacctccttagcaatgttcactgtataattatcttgttgggttaggccaacagttgtgacatcatatactctctctaaaaaagggcgtacgttgttacccaagaacccggaggctcctgtgaataaaagtttcataagaaaaagggaaaaactatatactattatattgatagaaaacaatagctagtgcgatattttcgctttatatatcttcaaatattcaccaaccatcttatctacagtcaagtcttcctcaaaccgtttcaatgcatttcgtgagaattgactataaatatcattactttccaaaatatattctattttctcagcaaaagtatcaggtacattctctaccgtatagccattttcgccattcaccacgatctcactaataccacccacattggaggctacaacaggtttcccgaaagccatcgcttcgataatcgtcatgggcaacccttcataattactgggaagcataaataaatccgcatattcattatacgcacccgcattgtgaagactccccatgaaaaagacgttagaaggatgttcttgcgtatattcatattggtttccaatccaaataaaagcgtatcgcggcaaacgcgcagccacttccagaaacaagtctactcttttgggagggaacaacctggctatacacaataccttacggacatatcctcttattcccacaaacgggtcgccccccaaggcacaaggaatggatataccattatatatcacccggacattccgccggataccctctcctcgcaaattccatccatcatattcacttactcccactatcatcttgcaatatccctgcaaaattcgttcaagcggcaagtattgcctgtaagcaatacgtatcgaatcaaaaccatgaaccgtataaacgatttttaatttaggaaaagctatacgccccagtattcctaccttagaagagtgaagatgaattatatcaggtttatattttccgtacaaacgccttaatgcaaacaaggtttttatctcatttattggagacaatgccctgtgcaatgaggatatttcttcccgctttatagaaggcgctaataatttccacattttaccatcaccttcaccggcagcaacgataacttcatggtccttgcaaagctcattagcaagattcacgacaactgattgcgcccctcctaaatcagtacgagttattatttgaaagattttcattgtatcaaatcattttattgcatcctgcaaatccatcattgcttttatcctatcaaaagaacttttcttcctatcccgcattttcaccaaacaatcagtttgtcccactaaatgcaccattgtaaatattcctatttttaaaaccgtttttattttacaaaataaagctctcgtaaatgataatgaataatcccttctgtttccaaacaatttcaacattcctatttgcgtcttcacatactttttccaatgaggtattccaaattctctataaaacatcagaggaatatctatattactgaaaacgctgctatttatagttcgtaaccataattcccaatcctccattctcacatatcgggcatcataaggattattcacaaaccattctttacgccccattactgaaggatgcagaaaacatatatcattcaaaaccgtattaacactcggactctctttcggaattttaacagaaactatattgttaaaattatcaattgaataccaagccgtaccaaccacatcaatacacaggttatcaactaaatacttaacctgcacttctattcgtgaacaatgcatgatatcatcagcatccatccttgcataaaattcaccttttgccaaccttactgattgattcaacctatatactaatcctttgtttgagtgatcagaaaaaacctttattttattattcttaaacgaattcgctataattaatgatgaatccgtacttccatcgtctataagtaataattcccaattatcataagtctgattacaaactgattgaatagccagattcagaaacttttcagcattatagaatggaattgctattgtcactaaagggttaacatttttcataaataacatttattttttatttgccaatgcaagtcccaattttatataaaccttcaaaattccataccacttatacctatttataagcaaaagaatattatctttgaatttaatttggcttaaagaagcattatgaagttcaggaaaaagattattagcatataaaaacgattcggcattatatacagttcccttcaacatgtgcaccttaagatacatctttgatatttgcagaatctcattatattcacaacaatctctattctgaaaaaaactttcaagtaatagcatcgctctttcaatgctttgaacagctttcacagaaatagactttgtgtaagaactttgattatactttatatagtaataacatattgaatctaatttcacaaccttattagctatacagactaatcttggagtagttgcataatcttcaccaaatccaatttcagtgtctaattctaagcctttgtataactcttttttacagaatctaaaacaaagctcataccttctttgcctaattaacagaagcttcaggtattcttctttatcaagtggtaccgcattttccactatcttatttttattatcagaataaagctccattacatcaaatacaaccatatccgcatccaaggacgaagctttctcatataatttttccactgcatccaatgctatataatcatcactgtcaatatgccaaacatagcttccagtggcgtgtaacaaggccgtttttcttgcagcggagagaccttgattcgtattatgattaataacctttacaaacagttttctatccggatattgatttaagacagtccataacttttcaatactacgatcaggtgtacagtcattgacaaaaacatattcaatagacttaaaggactgcgcaaacaatgaatgcagacatttttctatataaggctctacattgaaaattggcacaagaagagagacaaccggactttccattccaactaataaggatatttattaataaaaaagaatattaaccagattactaacggatttcatgaataacacacaccttcaccgtcaaataatttatttacacacatctacgcaagtttaatagtaagcttggagaaaaggcgataaaacaagtatagaggaaatatataaactacaacatttccaaatggtatctgagtattgaagcagatactaagtcctccccacaaggaacaatatatgagtacatatttaacaaacagatttgaagtattcaataatttataatcaaaatgcaaacctaaaatattaaatgcaactgtaaagattggagcaaacatgcttccaaaataaatatagcctaatcctgtcgctggtataatctgggtaaaccattccgtatccggtgaaataacatattgattaaataatatattcgtacgattcatttgatcaacagttttggatagtacaggtatagcacctacaaaatcattccagcatgtttcaaacgttatgttatacttatgtcccatatctatcgcatgcccgatcaaacttggtccagaaaaataatcttgcaattgcgatacaaatagatccgcaaaatttatcaatgaatagtcactacccaaatcattttgaaatttatatattgtgatcaaaaaaaacaagcaaacaaataatggaacaaaaaccaaaagcttcttgaccaaagttctgttaaatattattctaaacagataaaacgtaactacaaaatgaaaaattatagcccaacgacttgttcctagaattaagtatgtactaaacaagaataataatatggctaaacagaaatactttttttcatgtttggcagaatatctataccccaaaaagtttatcataactatataaaacaaatatttccaccatcctcctatgatggaaaaaaagggaatcattttactactgttctcacccttatcattcaacaaataaaaatccggaaaaaccagtttaggagaaattactaacaataaagtaaaaatacaaaaaagaaagaggaaccaaacagaataattttgtatgaatatccgtttcgaatccttactcaaattcctatttaacggcacaattgaagacgaatgttttctaatatataaatatctacataaataaatcaacagcatttcatacaatgtcaaaaatatagctaatgagaaagaatcttcattgggatccgagccaatcataatcggataagaatctataaaaataaaagaaacaggcataatgaaatatttcacaaaagctgcaatttcaaaagcacagcttcctggtagaataaccgtttctttatttttttgaaaaataagtaataactttattgcaacatactgcaaagggatataatagatttcattttttcctgaattaaaataccataattgaaatatcaatacacagcataacgtatataagaaaagctttttaacagtagattttacaccgtaaatcataatcaaaattataacacatcaaccactaaatcattaaaaaaaagaccaaaatcaaagtctgcttataatttttcttttttaaatatttatctgcttaaacagactctaaaaagaattatttttttgttatggtataaagccgcaaaaaagcattccaaaaagaaccaggaaagaaagaaaacatatacaatatgtatgtcttcattgtttctcccttcaatgcatattgtctaaccatagcacgaacaaaatcaatttcctttaaattattattattttcatgaaatgaatttctataataatggagtaacacaaacagaaattgacatatagtaaacctcttgtaaaacgaaacatcaccaacgccatcagatctatcaaccaatctcatccgcccctcaaaaatcaacagagatcttattttacataaataatatggatacgatctattcgtaagagaatccgcagtgatcctataatgataaggaaaatagctatatatcgctaagcacgtcacatattttaaatatgctaaagtaaagatatggtcttcctgaatagatatctcttcattaaattttatatgatgatcttgtataatacaatttctaaatagtttattacaagtccacccaaaaatttcattcgtttctaaaatatagcaagctttgattactgaatttatcccctcatatactcccgatattttttgcaatagctccatagtgtcagaatagtctacagcagattcatatttcaatccaaaaaagagcaaatctgtttgtttcttttgctcccatcctatcaatgtctccaacatatcaggatcaatccagtcatcagaatctataaagcaaacataatcaccttttgcatgatctaatcctaaatttctcgctgcacttactccacaattttctttatggaaaacatgaaccctagcatccagctctgcgtattcatcacaaattttcccacaattatccggactaccgtcatcaatgagtaaaagttcgaaattagtgaatgtctgcgacaaaatactatctatacacttacggatatatggttcagccttataaaccggaactattatagaaacctttaaaagtatattcatatcaccccaaagaatttaacaaaaattccattgagaagttctttctttcttctcttatcctattcacagaatcccagtctatagattttgtcacaatatcaaaattactccaatcagtgataagccgttcttctaatccatacattttcaacaatgaataaaaacgtgccatacctcttttttcattgccaagaactacgaattttttattaaaaataatactgaatactgctccatgaaaactgtcacatactacaaactcggcatccatgaaaccacgaagccatttggttacagaaggaaatacgcacctatctatgtcaactatcgtctttgcgccgacttgcaattccggcattacagaaaaaggaactaagttcagactcatcgccaccttagcaatataatccagtttactctgttccggatccaatatataaaaaagcagggatccagcacttttttcttcactctctttttccaccaaatgaatatagtcacactcatccaataacatggtcggatccaatacttggcatgcatctacatccaaataacgcctacaaagctcaatccccgaaaattctctaaccgaaactgcatcaaaagacttaaccagtttcttacatcttttagtttctaaatcagaaaattcccaattatccaccccaaatgatgcagcataagcaatacgcttaaccgggcatgaatcagtaaaattcaaaaaagagatataaatgctactattataacaaggccgccaaacttgatcgctacctacaatatatgcctccagcgacaaagatttaacgatccgccttatttgtctttcgttatcaatcttttcagtatgattaatgtagttatctacaaaacacagagtattttgacttatacgtttcaactcctgatctttagggaagaaaaagaattctctattcttgcctgtcatttttaataatactgtctttagagttgatgcaaacattctccacaaaggaattttaggatatttctgatcaatggtaataacctcatgtcccatctttttcaatacatcttgaagggcgtaattctgaagaataccaccataattattctgtaaaggctgagttataattccaattttcataaatacagaaattttatttaatcaagcaaccgattagtatccttcaacatcgaatatacgcgaggttcgatgatgacagcgccatctatcggagtcttaattacgttcattttgatatgattaaaataaaatggatggaatttcatacggacacgaccggtacgtatgcttcttatcttataagcactaatgatgcggtcgtaaacgttccaacgtatcacaacccacaataaaattatattataagtattacactctcagagaaattattcttttcaatgaaccatctctatcttccagtcccccagcgtcctccgttcactatcgaagttaatccccaccttcaccaccggcagtccgcacagtgcgaagcgttcgggataattcttcagatcaatctgtcccatggcgtcatcggccgttttgtccaacttcagttccatcacgtaaagagcggacaaactacgcatcaccacatccacacgcccgcgcggggtgcgcacttccacatccacatacatgcccaacaggctgaaaatggtatagaacaacgactggtaatggccttcataatcggtattgtcgcaataaggaattgtagacaggaaagcctgcaacaaacgcagtccatcgtccagcctctcttcatagatagcctcgtacagcagagccaccgtggtaagcccatccatcgtgtgttgatgtagataaccgggcagcagactcttcatcaagcccaaacggacttctttattggggatatccaacaaataaagattcgtaatgggagaataaccctttatcgtgatataaccgctttggtagagcaacggagtgatattcgttatccgttcggtaggcgcatcaaaagattcagccagtgcttttcgatctccaatctgttggggaattacatgatatttgttcagcatctctatcagataggtaggcgtaccactgccgaaccagtaagaattcatcttgccgtcggcaaaggcgttcagcaggctgaagggattataaatatcgggtgacggccaggtgaaatgatagccgtcatagttatctttcaatttcgcaagcacttcttcgcgagacacttccatacgcatggccagtatatccacatcattatccatctgagtcagcatttcttcctcgctgataccgcaaacagcagcatacggtccatccatactgatgttcttgatattattcagttcgctgaagatgctcagttgggaaaactttgtgataccggtgaggaacacaaaacgcagataaggatcgcaagccttcaacggactgtagaaattgcgcatcacatcccgaaggacaggcagattcttttcctcatgaacaacgtcgagaagaggagcgtcgtattcatcaatgaggacaacgacctgccgaccggtctgttggcaaacacggcggatcagtccggagaaacgatcattcaaagtcacttcctcactcactttgccatacacctcttcatatctatacaactgaacactcagcatttgctccagacgttccttatccacatgcttcgccatgctcatgtcaaagtgaagaaccggataccgagtccattccgcctccagcttatcaatggcaagtccctcaaacagttccttacaaccttcaaaataagaatgcagtgtgctggtgagcagactcttgccaaaacggcgaggacgactcagaaacacatatttagaatcgaaatgcgtcattcgataaacgtattccgtcttatctatatacaaatagttctttctgcggatttccgagaaagtctgtatgcctatcggataaagttgtctctgctgttccatatcttccagtttacttcgaaactatcttcaatttcctttacttagattacaaagttacgataaaatttcatctgaaccatacatccagcatgtatttttccatggcatagcggcattcactataacgcttttcatccgcattttcacgcaaataatgaaagatccggatgtaatagcttatgctaacgtctcgccaaatattacctgatagtaagtacgattactgattccacagccctcacacaattctttcaccggaattccggaaacttcgcggagaagtgccatgctatcccccaaagccttgtaagtgtaaaccacttttttcatattgttctttaaattaatgttaatatttaacacggattaccaacatggtggtaacgccgctattttctttctctataacttcaccgcaaattttaaaacaacaagcgatgaaggctctaaaaacaaccatctccgtcacggaactccaaaagaccctcggtctgtggaagagccgcaagattacggactccgtcattcctaaactcctgcacctctacctcggaatgactgcatacatgaatcaggaaaaagtatatcccgtggataatttttacgagatcagcatagcgctggcctttaaaaatgcaaagttcctcacggaagcggtcaagcgttgcggttcattcggcattgtacccgaaagaaacacatacggaataaaatatttctactcgcctctctggatagagaagatttcatcgggagaattaccggaaaagtttccggaaacttttccacaggataatatatataatatatataataaagggaattcttctgacgaagaactctcgccggaaggcgataaacctttagaagataattctgataagaaaaatatcgttacaccggaatctttggctaccgccaaagaatttttccatctcatcaacgaggattcagcacaaaaagcgcagatgctgacgccgctcatcaactggtttcagctgcacgaagggctcacacgaaaacacgcctgcgaaaacctcgtctatatggtcaacgaactgctgattccttacttcgcctcccaaacgcggtttatgaagtccaatcacatcggaagactttgctggctgggcaatctgctaaaatcggcccacggacaacatctgctgaacgatgccgcaaaggacagcaggctcaagcgggaacagcagacccgggatacccgaaagaatcagcgggataatcaccccgtcagcgaatttgaatggacggatccggagaccggaacgagattctatgacgatgacgacgaaggaaccgtgaacatccccgaagacgcactgccaagaccatcagcgaaagcgatatggaacgtactgagcaaccaatggacgtcaccacaattataaattactaattataaactattatgaaaccattttattatctatgtgactttcccgaacgcaagaatgcgggaaagaatttcgtaacagagtgccctaaatgcggcaaaaaacatctttatatctccaaagcgacgggagcctttcattgcttctacggaggatgcgacttcaaaggaaagctcaaggacttctgggaagaacgaaccaactatgactcggcatctacaagttacggtagcggaaactctaacaccacagccggtggaagccataacaccgcccgcaagtcccctcgcgacagcatccgggaaggagaaacaggaagcggaaagaccacatccgaagtacccatgatccccgaagactacaaaaagttgtcgcccgaagtattctccaaaatcaaaccgctgacggaggatcctgaaactgccgatcaagaccaactcactgcccggcgttatctcgcagaccaaggcatctcactgaaaacggccatcaaagcccatatcggatgcctcacgcatcgctgcttcggaaagaacgaagagagcaaaagcacaggaaccatgcatcattgcgtcgcctacgtcaactatctcaatggacagcccgtaaatgccaagtatcgctcgtgcgacccatcaactgtcaacacagcgaatgaagggcaaacaaacggcgcggaaaaagccgccggatacactaagctctggagccaggattctcccaccacaccctgcccgccttaccgcatcgactgcatcaatcccctgaaggtggccgaagaaaccatcccccggctcatcatcacagaaggcgagaaagacgtgctgacactcaccgaagccggatacgcctacatcatcagcgtgcccaacggagcggcgagcgacctctcaaagagtttcgaagccttcgagccctggctcgaccaggtgcgcgacatagtgatctgcggagacaccgacctgccgggaagaatccttgtgaagcatctcaccgactatttcggtgcccgctgcctgctcaccacgctcccaagcgactgcaaggacatatcagacgtgctcgccacctacggcgtggaagtggtgcgtgaaatcatcgaaacggcccgcccgcaacacacatcggacatcatcaccgtgaacgaacgcgccgatgaaatattgaatgcgctacacggagaatatgaccacggctacgacatcggttacggaccgctgaccgaccatgtattccaccccaccgaccagggaggcctgatcatcacgaccggaaagcccaacagcggaaaaaccgatttcctgaacgacctcacctgccggctcatggcaaagaccggacggaatgtatgttatctttcattcgaagtgccggacaagaataagcacatcgcccatctcatccagttgatgctgggcaaagtaaataccgccagctacacccgggagcaactgcaacccatcgtcagtttcctcaacagccacatggtgcacctcgacctgcacgaggtatcccccactcccaccaacatcatcgccagagcggaaatggcgaaccgtaccactcccctgaaatatctcattatcgacccgtacctcttcatggaagtggaaacgggacgctacaacaccgaaacgcaagccataaaggccatgctgacgcaaatgcaggcatggggacgcaatcaccacatctgggtaatcatcgtggcgcacccccgcagcctaaagaaacagaacggcaagaacgagctggaagacatagacatgtacaccatttcgggaagcgccaactgggccaatctggcggatttcatattttccttatcacgcgtcaaggaacaggaccggagctatacaagactcgacatgctgaaagtgcgcgatcaggatctctgccagaccggaagcgtgctatacgtgcgccagacctgcggacgctacgacgaacgggagtccgaagagcaggtgatagccgaagcccaaggcaaagtcatgagcaaggaccactcaccctggatcaatctcattgaaaaatgatggaaaagacacttgcggctgcgaagcccgacacttgcgtctgtgtaagcctacacttgcacaagtgtagcccgacgcacccgcaagcgtcaactctccactctcaactctccactctccacttccctaaggcctccctatatactcaaaaatcaggccgacctgcttgctggtgaaaatctgttgggcggggcggtagcccgtatccagcaaagcctgatacagaagtgcgttcccacgtaaccaccgggaaaggcggttcagagccgaacgctctccgatttcgggcgcgtaagcgcgcgccaactcactcttggaatagggacggacaggccattcttccacggccgcatccacatcatgatcacatacgattgtcttcattttacgataacttttagagtactgtttatgctataaaggtacgaaaaagtcaccggatatcacctattccgaaacgggtttatcaggtgtcaatgtcactcattttcacaggtacgggaggttgtatctttgtattgttcaccaatttaattctttaattattaactttttaatttatcaattatgccactgaattacagtatcgcaatgctcaaaaatccgcagaagccggatgaggacgcaaaggcttacgccaagtcgcaaatcacaagggaactgcccctgaaagaactgagccgccgtgtagccgcgcaaaccactgccagccgtgccgacgtcaccgcagttatcatcgctaccgtagaaaacatgattgacggcctgcgagcgggcgaacaggtagacttcggagacctggggaaattccgtcttcagatcaccagccgcggggcggaaaccgcggaaaaattcacgtcttccaacatcaccggagtcaacatccagttcattccgggcgaagatttgaaaaccatattctccggtcttgagttttcacccgtacccacccgtgcagccacccgtctgctgctcaaagcccaaaaggcaggacagaccacggtggacttttcaaaaacgccctcttccggtggaaattccggcagcaagccggatgacggtgacaataccggtagcggtggtttggacgagaacccgctgggataggctctaaaggtgcagcctttagaaattaagaatgaaaaaattaataattaaaggctgcgctttcaccaattactaatcacttatcactaataactaatcactaaatcacgtttatatggaaaagaaatcaaaatcagtatggggcattgtcctcaaagttatcgtcacggtagtcactgccttggcaggtgtattcggtataacctcctgcattcactgatgagaatcatcacgctcatcatcattcactgctcggccacgcctcagggcgtgcgcctgagttttgacgagtgtcggcaagatcacatccaccaccgtggcttcaacgacatcggctatcacttctacgtgacgcgcgacggtgagattcaccgtggacgaccttacgaatgcattggagcacattgccggaaccataaccgccattccttaggtatctgctacgaaggcggacttaccgcttccggacagccggctgatacacgcaccttacatcagaaagcttcgttagtagctttactgcgcgaactgaaacgggtatttccacgggcattgatagtaggtcatcacgacctcaatccgatgaaagcctgtccttgctttgatgcggcaaaggaatatagggaattaatagaattatagcgtaaaacaaatccttttttataaggcacctgacgagatgccttataaaaaactgctataaaattcgatatcatttttttaatctccgctttatatataaccaaaccttttgtttggtcagcatgtcaactccaatccaatatattgataatataattataataacggttataaaacctataaaaatggagtgtgaaatgctatcaacacctattacatagtataaaaaaacaggtacaggcagagcaaccatagtaaccaacaaacagggtttaaaaacatcccagacatctctccaataataattggctattttcactaccaatataggctttactattagccccaatacggcataagtcaataaactagcccatgaaagagcaaccggagaatatcccgctttaaataagaagtaaattataggaaaactaataaaacctaaggttggtgatattagagcattttccctcaaccgtcctttagcatacaaagctgtataaaaagaagtgtcaaaaacttgaaacagactctgaataactataatctgaagaaatataaccgtataatcaggcacaacacccaaccatatctttaataaaggatgtgcgagaagacagacaggaaaacagattataaacatcatataataagaatacttggtggatgccaacagtagccttttagaacccatcaagtcgcccgccgccagcttctttactatctgcggattagccgcagtacgaaaattgtcgacgaactggctggccgccatatttacctgaatagaaatagatcgtgccgcaaccacagcaggttcaaaaaacatattcaacaaaatcagaataccttgactattaagagcgattgaactaccggcaaataaactccatcccgagaatcccgctatttctttaaatatagccttatcaaaaacaaaacgataaaccgtctccttaaaatgccgactacaatacaaacgatagatacaaatgagtcctacctgaactatgaataataaagtggcatacaattttaatttatcataactgccaatggataaaagatagactattcctagttttgccgaaacttctataatgctcatatatgcaaaaaccgacattttctcatgcgcaataatacttgcattataaggaacttgtgtcaatgtaaacacagcagttaatatggatatatgaaaagtataaactgcagcgtccatccgctcagccggtatcaccaatttattataaagaaaccatactccgagcgtttctgcaactataacaacaaagagagcaattgctatatgaatagtcaatgttgtagagaaagttctcttcaacttttcaagattgcctgttcccagttcgtaagttaaaaaacgagacgaacctgtgctgagcgcactattaataaaagacaaaaagcctacaattccacctacggactgataaataccataattgtcaactcctaacgtttgtagtatcacacgtgaagtatacaatgaaactatcattgtaaacatcatacggaaatacagaaatgcggtatttttggctatagtttgattggtagaaggtacagacatcaaaattagtaggaataagtatgattataggaccattttctataatatggaaaaatcacaattatcgggatcataacgaagtcgtgaattgatatttatattatcaatagcaatcatttcatctgcactcaactcaaaatcaaaaattgagatgttttccaattggcgtttctcattcaaagaccgcacaacaggaattaaaccattttgaatatgccagcgaagtatgatttgagcaatagacttatgatatttttcagacatgcgtttaagtaaaggcaaacgagtcaaccttacgtccatacgtgcaataggggtataagcttctacttggacaccacaagacttacaatattttattaattccttttgtgtaaaaagaggatgaacttctatttgatttatcgcaggaataacttcagaaacacttaacaatgcttccaaatgatgcttatggcaattagcaactccaagtgtccggcaatagccctctttatacaattgaaccatctgtttccatgtatccaaatataaatcagtaacaggccaatggaacattaataaatccacataatcaatccccataccctccaattgctgaaataagcattctcgaatcttaccactcctttgcgcctggttactcactcttgttgtcaaaaacaaatcttttcgatcaatgcggctttttcttatcgctttatttatcaaaaacccatccccatatgaggaagaaaaatccaataatctaaagcctgctttaaaagcatgcgccacagaattgacataattatgatatagcacaggacgcaaacaaaatttattataagctctaaacccaaaattgattaaaggaatgtctgatttcaaagttccactaagagcaataccaggaccaatgccaatagctggaatggatacaccattattcaattgaacttcattcataatattctatgtatttcaaaagtcactacaatgcttctattagaagatacttgtttcattttatatctatgtcatttcaccatgaccgggacaaagagtcttattcaaaaccaaagattttattaattccatactaaatgctgccttgaacttatcggcaccgggaaaattggtgactactttagcaccaggaatataagagtctcccgaaaacagataatcatttatgatatagctgatacaactttcggaatgaccaggtgtaaagaaagctttagctgatgtgaaaccaatattaacttcgatgccgtcttcaataacaattatattttctttttcatttaagacaaatggggtttcatgaaagaatgagatattcttctttgccgaaagcaacccctccctaccataatggtttgtgatgatacgacactcaggataaatcgttaacaacttgttcagaccatatatatggtcaaagtgtgcatgtgtaagtagtaccccatctatctgttttgaatgtaaaagaggaatcatattgtctgtgtcgccacaatcaacaagccatacgctcgctgaactgtcatcctctaaaatataggtattggatttgaatatatcattaacaattttagtaacctgcatttattgaagtactacaccgttttcaacttcaacaatatcactaattttcaaatccaagaaaggcacaatagcatttgcccaagtcatacctacgccaaaagcactcataaacaatcgcttgtcaccatccatcttaccatttagctgatcaacaatggtaagcggtatagaaacagaagaagtattaccatatttgtcaattgtagaagggatcttattaaaatcaagtttcaactttttggccaaataagtattaataaaattgttggactgatgaaatatataatagtcgagagattgaatatcaacaccgctccatttaagtaaagctttcatatcacgcggtatttctgtgattacaaagttaaacacatcagcccccttcatatacccttgctcatcattgcggatattgccatattcatcaacaactctctccgttaaagtttcaatagaacttggattgcggtaaccgcctccatttatcttaatcaaatcaccacgtgaaccatctgaattcaaagagaaccaactatcacctattttcttattgcgttctagaagggcagctacgcctccatctccaaagaggaaagccgtgcgtcgatctttgggagaataaactttagaacgtgtttcgccatcaagaatcaaagccttgcggataccagactgctgcatcattgcaaaaactgtgctcaaaccatacatgaaagcagaacaccccagtaccatatcaaaagctatggtagtagtaggaagcccaagacggtcttgtaaaagtacagaagtagctggcatgcgataatcgccagtctgcgaaataaaaacgagcaaatcgatttcgcttttatctatattattatccgctataagcttctctgcagcagcaaaacaaaggtcacttgaacaggtctttgcatccgcgtaacggcgttcgtaaataccaactttgtcaacaatctgttttacctgatcctcagaaaagtattgagtatatttataattatcaattacctgccgcggtatcgcggcagccaaagccgtaattcccaccccattatatttcaaaaaagccataaattatttactattaaaaaaaatactcattgttttttatttgcgtatctacagttatacatgtgcgattcttggcatctttaatttgcacttttataatacctacgccaatattttcgataatatcacaaagtttaaccacaatcttataggattcatcaagatatatcgggcggatgaacttagcagaacgctgtatgttaatagattccggataaagtttcgatagaataccacctaccaagcatacggaatacataccattgatcaagacacgtgcatccccatgtttacggtgcaattcattcaaatcgccaataatatcgcaaaatatcacctgtttatcgtaattaataagcagatcggcttcataagtttctcctatttgtaacatctgataaaattactctatgcctatatcagcagggctattgataataccttcagtaaaaatattgtcggtttctgcaactggtaatatatcatttgtattgatccgggctgaagccactccccatgataagccaatgccaaatgcttggataaggcaattgagctctttgttagagttatcattaccataagtatcgcataaggcaagaatgagagatgttgcggttgtattgccatatttgtctactaccagcggcatcttttcaagagggatacccagttttttggcaattcttaagcagatagccttattggcctggtgaataggaaaacaatcatagtcatccacttttgaaccggttttctcaaaaaaagccttagtggtctttggtacggctgaaattgagaatgcaaatacatcagcaccgttcagccacgtattatacaatgtattcttactgccattggcaagagtgaatacttcgtgtgtagcatccggattacggaaacctccggcaggcacaataatagctttgaatccagaaccatctgaacaaagcatttcctcaatgacattctcttcttccgttttctcaagaagaattgcagaaccggcatcaccgaaaagcaatgcggtagagtcaccttgataggtactttgagacgacatttcgccaacaagcaagagcaccttcttaatatcggatgtctgcatcatagaacatgcagcctgcaagccataaggtgtagcagaacaagccaaacgaagatcataggctacgcaaccctgagaaagtcccagtcgataatgtaaaatgcaggcgtttgacggacgccaatagtctgtagagaagccaacaaacagtactgcgccaatctcttcacgattaacatttttatgttgaataagacgttccgctgcatcgtagcaaaggtctgatgcggtttgatgttcggctgtagtatgaatctgttcaatgccaacgttagccttaaacttttcaatatactctttgccccatacatctgctctatcatctgttttaacgatatgtgaaggtatagaggtagctacacctgtaattttaatattactaaatttgaaataaggcataaattattattttatagtttacatcctccatcgatgaacaaagaaatgcctgttatccatgacgcagcatccgaaagcagataaacagctccataagctacttcttccggtttgccatacctcttaagagcatattctgccgcattcttctgcatatcttcttctgaataagaaccaccataaataagaggtgtttcaaccatgccgggacagatagaattaacacgaatacgtggagccaattctttggcacaagagatcatcatcgagttaagcgcagctttggatgccccatagattgagtttcccgcaggaaaacctttaattcctccaatagaagctataataacaacagagcaattcttattcactttctttgacttaacaagttgacggagtaactcaacaggagaaaataaatttgtggtaaacatgtcttgaaactgttctggtgttgcaaatttgaaaggaactgttttcatctgccctgcacacaggacaaggccatcataaatagcactacccaaaaccaatttctttatgacattggcatcattaagatcacccacataagtgtcgtggttttcacctgtcaacaatgatagagtttcattgagacgctcttcattgcgaccacagatagtaagcgttgctcccatcttagaacattctattgcagtggctttaccaatgccggaagaagctcctgtaacaaggatatgcttgctttctaatgaaaatggattatacatattatatctctactaaatctgatattacaatattatcggtttcaaaagccacagtagcccaagaaagccctacaccaaaaccacagcaaagcaattttgcaggctgattttcaatcttatttttaagttgcgtgactattgtcagaggtatgctggcagaggatgtgttaccgaatgtaggcatactgataggaactttctcaggattaagcttcaacttcttctgaatcatagcgttcatctttaaattagcctgatggaaaacgaaatagtcataagcctgataatcaaattcaaatctttcagccagtttcttgattgattttggagcggtagaaatgccaaagctgaacacatccatacctttcatgcgacactgcaaacgtgtatattccttaccatcaacaatttctttcttgaaagagtttatagataaaccattgcgaactcctccatcaggcataataatggcatcatagccactaccatctgttccaaaatggaaattaaatggttgggcatcagaactgtattctaatgcagtgactgtaccggcaaaaccgaaaagagggtcatcttctggcataagacgctttgcatcccctgccatcaataaagcttttgttatgttaccagtctgcatcaaagatgcagcaatactaagaccgtaaacccaaccagaacaacctaaattaacatcagccgcataacattccttggttaatcctaatctgtcttgcaatatacaagaagtagcaggaaatctataatctgcggtttgcgaaacaaatataatagcacctacttcctttttatcccaatttaaatcagctaataatttttctgaagctgcataacaaagatctgaagtacatgaagtgttatccacacgacgttcacgaacgcctgtcatttcaacaaatgccgcggcatcatagtctgcagaataaaccattgaatcatcattacgaacaatagttgccggaacaccggctgcaaagccggcgatccgaacattatcaatttgaagaaatgccatgcatttaagccttactttgaataagattaaacaagtcctcgatagtctcggatgtcttgatatcatctcccttcagagttatatcatactcttcatctaccatagcaatgatagaaagagctgaaagtgaagaccactcttcaagagctttaaactctgtatcagctctgaattcagcagcatctgtttcgtcaaattgttctgcaaacttttcaatgaattctgttaattccataatgtttttagtttttaaattataatatataatagcgtgactttagtatttccaatgtacatcagtttgcaccacacgggcgggatttcctgcaacaagagaataaggaggaacattggtcgtgactactgtatgggcactaattatggctccatctcctatcttaaccccctgcatgatggtacaaccttcacataaccatacatgcttgccaataatgaccggcttcgatgttttatagccttgaagagacacatgatgtccaccattattatctctaatggtcacattccgcccaatacggcaatcttcgccgatttcaatgtgatctccgcaaatcaaagttaagcccatattgggtccccctcccttgaagtttccaaaatcattgtgtataataagcgaggcgcctttgaatacttcaatatcgcaaccatagcctgcactaaaattgctgtctacctgaagtgtagcactttcttctacaagcaagcggctttcaagctttgaaccatgtactcttcggcttcccatatgaaaacgagcgttcaatataatgttcgctttaggatggatatcccaaacggtataacgtgaaagggcaatatacccccctctttgtatattaggatgaatagatgaaggtggcagaaaattcaatttaactaatttcaaaaaatgatatggacttccaaaagacaactgtatcaatcttcggatacaacaaacagtattctttagtttaattcttaccgaagagttattaggtaccggaaaatattttgcttccagatcttcaaaattcatatattgcgcatctttgaaaaattgttccctgtcaactttgcttggagacaaagatttcataatgctgggattaccaagaacggcctcctcgaatggaaattcaatacacttgattttttgccgaatatcttcaaataatgctgcacccttttctgaattgactagaactaacgaagtacctacattatcatccattgatggatcaaacttttcgataccccaacaatcagcaagagtgatatcagcgatacgaggcatacccttaaacttgcagctgtagcaagatggacgacaaaatgcattagtttgcaaatagccgcgtgtcattccgttgaggggagatggaatgaagagacttttaccattagcaaagatatatttggcagccattagatgccacccaagctctttatttttggctttttgccaaataacctttgaaccttctttacgttcaagactttcgcggaacttagttccaatcattggagaattaatacctctacacacaaaatccgcaataataagattctcatacggcttgcgtaaaaagatcctaagagccgccatttggcaaggacaaccgcagacaaggactttttcaccggatttcaagatttctttcacctgcttaaaaaatccgacacaactactttgagtatattttgaactacgcaaagcaagcaagtcttttttatcattggagatgaattgcttcacattgaaattttcatcatatattgctccacccacataacctctgtcacgatacattttttccgcaaaagcagagaaaagtccaccggaagtagaatcaaaacgcacttcaagattcttgtgtatagctgcataacactttggcacttcaaaatcattctttttcagtttatcaatattgataattggacaaaccttctcacacaatccacaattgttacacttgctcttgtctacctccggataccaaaaaccttcaatatccgttttgaaagtaattgcatcatgagcacacacgtcgccacaggcattgcaaccgcaacacattgctttatccgaaatatcaatcatatgaatggaaatacttaatgaaaatataaaattctgaccaactcactcttctggtaagccagcacacatattcacactgcaataaaatgatgcagcgccaataataaaaagggggataattataattgatttatcaatctatcaagcgtgaccaacaattgacttattggtcctaacaggggaagtatatcttcacttgcaaaatcaaagaaatcattatagtcacccgttacgcgattttgtaataaacgggaatacagatagccttcttctttcgtcaaaagacctttagatacgaaactcaagccaaactgacctacccacaccgttatgactatgaatacttatgccaaattgaatcacgcctcaacctcttcccacgaataaggattttcttcgatatttttcaactcttcaataatctctacttgctcttccgacagtcgaaaagtgccccaactttcgataatggcatgagcttccttacttagttcctcttcataaacctcaccatagcaataagtcagcagacggactttcaacaatgaagcagggatcagtggaagaacgttaagagcacgctccagaaccttctgaatatattcctgtttatgcccattatcatacattgtggcattgaaggctactaaaagacctaaacacagctcagcttcagcttcaggagttgagccatgttttccatacgagtttaaggctgattcataaacatcacgattcagacgggtgaaactatcaacataaatcggactgccatcctgacctagagtgagaagactgtgagccagggaaaataaggatgaaacttgatcactcatatatttaattatgatttagaatttatgatttatgacactgaaattagtcagttatcggttctacaagcgaagagtgaataaaagtcgttgcaacagccatgacaccttcaatattgacaactacacgacggtcgcgacggatacgaacaaattctcctacagcaccctcaaaaacaccgcccatgacacgcaccttctggcctcttaccagttgaagttcagcgggttctacataaataaccgattcttcgtaggtaccagcaacaagaatgaaactacgcatctgatcgtctggaacgataacaggaagatgatgctcccgattcattatatagcgtatagggatgttcataccggctttatccttcaatgtatcgatacgcttacgagtagagcgaatgaaaacaaggttatgcacggcaggaacaaacttacaaatgcgacgaccatctttcacgacataatcgcgacgcatcggaatgaaattctctatcttctcttcatccagaaaagctttcagagccagttcacggccatatgtgacacgtactgcgaaccagtggaggcgaggaggaatgttcacgtcagaatattctttggggacaccggagtagtgaaatacttaccgattattttatgtaatgcagttgttttcaacaacttatttagcattcatcttattccaaagcgttccgtcatctcgatcaaaaagcagtgaaatagttatgtaaaaaggttattaacgaagagataaaagaaaacgaagtgtcttttaatcgttcgtttaatgtgcacaattttaaacgtaaaaaatggatactaggaattataaaaatgagaagatattaaatccatttagatataatatagaatattgattatcaacaatataatgtttgaaataaaatctattagaaatatttttattaaacaccttgtacattcgaaaaatacccattatctttgcgcacattaaacgaacgttttttgcacaccccttatttcaggatgatatataactatatatcaatgtattatcattcctctaaatactttttagaaatgtctcttttcatactttctatctataataaaaaaggtcaaatccattctattattcgtctataaatcagaaaaatagtcattacatcaaaagagagaaagattatctcctagtaccttccttttatatttaacacacattaagccctcctcaatagggagaatatcaaatcctcctgtctttactacacagaaaacgaattagacatttactataaactataaaatcacgaacagaatggaaaagaatcaaaaagatatgatcggtgagatcatagaggcttttgaaaagtatgcaggacaccaggcatttgttattaacaacatcacctatacctatcgtcaactgtctgaaactgtatataaaatatccactttgattaataacagggaagataaaatcatcggcattatagccgaagatagattggagacttacgcctccatactggcagtattaatcagtggaaaaacgtatgtcattctgcatccagcctatcccagacacaggaatagaaagattgcggaactcgccgatattcatttaattctatatacaaaggacatccgtgtattgaacctggataccgaacatatagattttatatgtacttcggagttacaggaagtagttccgtcttcttctggcatacattcggaaaagaatgaaaatgcttatatcattttcacctccggcagtacgggagaaccgaaaggagttcccatctccctcaacaacctaaatgctttctacaacgcatacagccatttggactggcaattggacgagaacgaccgtatgctgcaaatgttcgaactaacctttgacgtttctatcgtttctttcttatttcccctaacaataggtgcatgcatatatacagtttctccggaaggcgtaaagtatatcaatgtcattgaaatattggaaaaatataacctcacatttgctgccgtagccccctccctgctccagttattattaccctatttctctgagatacaacttcctgagctcaaatacctgatagttactgccgaagcatcggatgttgaattactatctgccttcagagcctgtgctcccaatgcctcttttgtgaacctgtatggtcccacagaaggaacaatttattgtacagcctaccagataccgaccacctcatgcaaacatcataacggtatgattgctataggcaagccattcgagggagtggatgctctaatcatggataataacggtattcccgttgccacaggcgaaaccggagaactctggatcagtggcaggcaagtaatgaacggctactggaacgctcctgaaaagactaaagaatgcctcatcgaagggacagatggaaagacttattacaaaaccggtgatctctgccagatagatgccgacggcgatatcatatattgtggtcgcaaagattcgcagattaaacttcagggattccgcatcgaactaagcgaaatagaacacgtggtgaagaagtatttcaacaatgaatgtaaagctgtcgtcatccccaaatatggagcaaacaatcaatgcgaattacatctggtagttgaaaaagtccatctcgacaaacaccagatagaagaacatatgaacagccggctacctttctacatgattccccagcacatacattgcatggaacattttccactgaataccagcagcaaaaccgatagaaaaagaatactggaactaatataaaactaaactaatatgaatacgcagatgattttaaatgaactgagcctgatttttcaggagatattgaagagagacaacatcgttcttgccagtgaaaccactgcccaggatgtggaaggttggaattcattaaccaatatgttgctgataagcagaatagagaaagatttcaatgttcacttcaccttcagagacattgtccgattcaagaatgtaggagatatttgcaatgctattctcaccaaaaccaaataagacatgtcattcatatctttgaattttgtcacgctgtttgtatgtaccttccttttgtactacacacttccacctaaatatagaaaagctatactcttgttgtcaagctgtattttcataggctattaccacatagctttcctgatcatagcccttctcatttcactggcaactttttttctcggaaaatgggtgggacaatcaaaacatgagaaggatgcgaaaagaatctatatttcgggcttgtgttttctaattacaggctggttggcattccgatatgccaacctcctgccaggcgtgcactggctattccccttaggcatctccttttatacctttcaggccctttcatacctgacggaaatctattggaaagaagaagaaccggaagagaaccttgccgacttcatgatatatatgctctttttcatgaaattcctgtcaggacctatagaacgggcgagagatatgcttccacaattgaaatcgggtaaaccggtagcatatccatccattgtctacggaatgaaactgatcgtagtgggactgataaagaagttgatccttgccgattatatttccccttatatagatggtattttcaactctatacatacggcatccggtatccaattactcatggcatgccttttatatcctgtagaattgtatggtgacttttccggttatacggatattgcacttggaggtgcctgtatgttgggattcaaactcagccctaacttcaaccgcccattcatagcgcaaaccactgccgaattctggagaagatggcacatgtctctttcattttgggttagggattacttatatttgcccctatcttcgggtatgcgccgttggggacaatggggagtattcctgagtctgagcctgacatttgcaggattaggtgcctggcatggcgcaggatggaactatattatatatggactcatccaagggcttattattttctatgaaatgaagaccgccatgatccgtaacaagataaagaattgtataggtaatcccctgtttacaaccctgtccatcctccgcacttatctgcttttcgccttttctttgatcttctttcgcttagagtcggtaagtgatgcgctctattacatcagaaacatctcgttcagtacccatgccagctggaaagaagtaagcatcggaattccggatcataattgtattgtggccggtagcgctcttgtactgattttagtttacgaatattttatgtcgaaacgagatcttttagaagcgttggaaaaacaacccatgcttgtcagatggagcatttattatctgctggccattatgttctttaccttgggacagttcaattccgacagttttatttatttgcaattttaatctaaaaacaaagatagcagaatgaagaaaaacagtgagcgaagtgcagctatgcgcttcacgatgaaactatctatactcctgacgccatttatagccttactagtggtgtatttcctcaatgatccttttatggttttaaggcattataaccgttatgataactctcccgtcatgttaaatgaaggctatatcggttggcaaatgtatatgaacaaccgggattccattgcatttgattcttttattatgggcaattcctgcaccatggcctatcaatgtcatgaatgggaaaaatatttggatggtggcagagcagtacgcctgttcggaaatgcagaaagcatagccgccatcagtaagaagttgcaggctttggaaagaaatggtgcagaaataaagaatctgctcctcattctggataaagagtcattggggaaagaccagcttttaagcagccataaccatgtgttgcctccggctatctcaggaatcagcaactttagtttccaggagaaattctgtcaggccttcttcttccctaatttcctgtttccttatctcgattataaaatatttcatcaatatcgtccctatatgcaaggagtgataaacccttatggcgcaatcagagatgcagtaacaaatgatgcaatcaatcccagagaggggatgatccgggatgaaggagaagcatattgggaaaaccacaaaaaagagtttgtgaaagccagagactgtaattacagaaatggtgaataccgggaaggtgagcgattcctatgggaaacacagaccgaattattaaaggaaatagatcaaatctgccggaaacataacacctcggttaaaatcatcatcagtcccgactataaccagatcagcataaatccggcagatgtggaaatattgaaagacatttttggctatgaaaacgtattcgatttcagtggtatcaatgaatatacgaacgatattcataactactacgaaagaggacattacagaccgatactcggagcgcgcttattacaaaaagtatatgcaaaccataactgatttgaaatacatattaaaagtaacaacttattatgcgaaactatttctgtagagtaagcgcccgcaattgctccaaagatccgttgaatacattcaaatcgacctcttctctgataccgggaacattccccacatcggtatgttgccagaagtgccatggaccttcatatttgacggagtctacgtaatagtgggcaatccagtagggataagtattgaataccgaatcactaagatagcggttcttgaatttataagatgtataaagaatcggtttcacaccataatgtgattctatacggtcgagccaagttttgacagcaatccttaaatcatggggagtacttttaccaatagtttcaacatcaagcacaggtggtagatctccgggaataagctggaccgtacgaataaagaaatcggcttgttttagcggatctgttttaggagagaagaaatggtatgctccgcgaataaaaccataacgatgcgcctgatcaaaattgaacgggaaagtatcgtcagcatgatcaccaccttcggtagctttcataaagacaaaatggataggaaatttggttgttttgttggttgtcagttgcacccagtcaatactgccttgataatgggagatatcaatgccatgcacttcatagtcgcagggcatacagaccccatatcctttctgaccataacagggtttccaacgataggcatacggacgaatgaaaaaccaataaaacccggcagagaatacggcaatgatacaaacagcaagtattgtacgtaaccatgcaggcatgatacgcgcttcgcttttctttttaccgcgacgtgcagcagattttcttttagttgccatgtaatattcaaaacagaacgcaaattacacaaattacgcaaatagattattcaaatttgtgtaattcgcataatttgcgttctttttattaactcttcgtcagtttgccgatttatttagcttgctctaactgcaaagtcttcgtcggctggtcacaaacttccgtaggtccgaagtactggatcggtcccggatatacataatctgtagtgatagcccactggtcacgctgagcagcaaatgccttgaacggagcaccatccagtttcaccagagctttctggattaccggtttcatttcaccgtgacggcgttccatattcatcatcatcgtgatgggcacaccacctgcaatccattggtcagcaggagccgtagtgttgcgtacagaagacatatagcctgtcttgccgttagcaatcagagaagcagctgtataacccaatgaatagcaatagtcagcatcgtagttagacggagcagcgcaacggccttcataaccgaagaagtggtgttgagaagcgaacttacctacgaatttaccttcttctttccatgcagcaagcttagtagctaccatttccgacaacagtttttctgtttcgatcaaagatacctgtacgtttccgtgtgggtcacggtccagcgtcagctgacgtgcaacaccctcaggcaggctggcatagatagccgcattttccggagacagtttacggatgatataatcacgttggtgagacttcttaatttgagagaattcttcagcattttcagcaaggaagtcgttcaactcagcgatcagacgtttcatagccggaataaactcgatcaaaccttcagggatcaaaaccgtaccgaagttgttgccttgagcagcccggttagctactatctgagcaatgtaagttactacatcgtccaaagacatatcttttgcttcaacttcttctgatacgatacaaacgttaggttgcacctgcaaagcacattccaatgcaatgtgagaagcagaacgtcccatcaacttgatgaagtgccagtatttacgagctgagttacagtcacgttgaatgttaccgataacttcagagtaaaccttacaagcagtgtcgaaaccgaaagaagtttcaatcatttcgttcttcaagtcaccgtcgatagtcttcggacaaccaattacctgtacgccgcacttcttagctgcatagtactcagccagtacgcaggcatttgtgttagagtcgtcaccaccgatgataaccaatgctttaatatcaagttgcttcaggatttccagacctttttcaaactgatcttccttctccaatttagtacgacctgaaccgatgatatcgaaaccacccgtgttacggtattcgtcaatgatatctgaagtcagttccatatagttatggtcaaccaaaccgccggggccaagaatgaaaccatataacttgctgtccttattcaaactcttgataccgtcgaagataccggaaatcacattgtgaccaccgggagcctgaccaccagaaaggataacgcccacgttcatagctgggaagttaaccacttcgtcagtagcctcaaacttgatcaaaggcattccgtacgtgttagggaacaatttttggatagcttcctgatcggctacagattgagtagctgctccagctaccgccttaacggcacccttcagcgctttcggaagtttgggctgataagcagcccttgcaatttgcaatgcactttttgtcattttatctaattatttaaaggtgttagtaaagtttcgttcaaaagcgtcgcaaatttcgtgtttttttctgaattatgaaaggaagcgcacatcaaaaaaaatatgaaatgttggtttataccgtggaaagtacttatctttaccggaaatatttcaatttattcacttaaaacgtaaagattatggcaagtagaagagaacttaagaaaaacgtcaattatatcgcaggtgaactgttcatggagtgtttggtaaacagcttatacgtacccggaaccgataaaactaaagccgacgagctgatgggcagaatcctgagtgtgcaagatgaatttatcagccgaatcagccataccgagcccggaaatgtaaaaggtttctacaagaaattccgcgaagactttaataaagaagtagacgcaattattgacgctatcggcaacctgaagtaagcaccgggaatgaaaaaagcaatatacagctttatctactatcgcattttgggatggaagacaaacgtaacggtgccggattatgataaatgtgtgatcactgcagcacctcatacatctaattgggatttatttatcggcaaactattttacggagctatcgggcggaaaacctacttcatgatgaaaaaagaatggttcttctttccgctgggattaattttcaaagccgtgggaggcataccggtagatcggggacgcaaaacatcattggtagaccagatgacggcaaagtttgcaaacagcaagaaattccaactcgccattacaccggaaggaacccgtaaagcgaatcctaattggaagaaaggattttattttattgcattgaaagcgcaagtgcctattgtaatgataggcatcgattataccactaaaacgatttctgcgacaaaggcgattatgccgtcgggagatatagaaaaggatatgcgcgaggtaaagctctattataaggatttcaaagggaagaacccgaagaactttgctttaggaaacatttgataataacttttaggcgcggattacgcggattacacggatttttattaccttgcggcgtggaaagccgggcaaataatctttgcctgcaagtatagcgtagcacattaatccgcgttatacgtatgatccgcgcctaaaatatttcaatgaagttatgcgtgtaactctattacaaacagatattgtttgggaagataaacaagaaaatctccgcctactccgtaggaagctcaaagcgcttcgtggagtagcggagattgttgtcttgcccgaaaccttctctaccggttttagtatggacagccgaaggctagctgagccggtatcgggtgtaaccatcgccaccttgcgccaatgggcggcagaattccaattcgccattacaggcagttatatagcttgtgatgaagaagtagatgcaaataaaaatgcggttcccattcctgataagtcttattataaccgtgcttttttcctgactcccgaagggggggcttattactacgataaacgacatctctttcgtatgggccaggaaacggagcattttacagcgggtagccagcggtctgttatctcctaccggggatggaatatactgctgttagtctgctacgaccttcgctttccggtatggagccggaacgtaaataatgaatatgatcttctgatatacgttgccaactggcctgttccccgccgccgggtatgggatattctgttacaagcccgtgcactcgaaaatatcagttatgtttgtggtgtcaaccgtatcggtacggatggaaatcaaatgctatataatggcggcagcgtcatttattcaccaaagggcgatttgcttgccagcgtacccgaccatgaagaaggaaccgccaccgcaactctcgacctctctgtcctgagagaattcagacaaaaattccctgcatggaaagatgctgaatgtttccaaattaagaattaagaattaataattaacaattaaagcactatgggacgaatgaaagctaaacaccgcatagctgacaggttattctttctgttactgaccatcttagttttttcctcttgcgcaaacagcaaaaaggatattattccttctgccgagtatgcaccttttgtgaatgcatatacgggaggagttatctcgcaaacttcgaacatacgcatagaactgacgcaggatctgcctatggtagatttgaacaatgaactgaaagaaaatccgtttagcttctctccctccctaaaaggcaaagcgtattggatcagcaacaatacgattgaattcgttcctgaaccaggaactttaaagccgggagagttctatgaaggtacgttccaattaggcaggtttgtagaagtggacagtcgtctgaaagaattcaaattctctttcagagtacaggaacccaatttcacactgtatatcgaaccactgacaaccatcgacatagatagccatggcgacttggtgacattgaaaggtgaagtacgtttcagtgatgccactcccaaagaagcagttgagaaaatgctctctgccaaaggcggaaacggccaaagctatccggtcagtatcactccaacagatcatccgacgcgctatcagtttgaaatagccggtgttattcgcgaagcggaagactatcagttggaaatcaccgccaacggcagccctgcaggaatcgaccgcaaactgacagaaaacgtactgatccctgccaagaatgacttccgtttcctctctgccaaacgcattgacgaaccggaaaatggaattgaaatagtattctccgatcctgtttctaccacacaagacctgaacggattgattgaaattcccgaagtatcatcttctatatttcaagtggagaataacaaagtatacatctactttgaagccaaccaactgagcaaactgactttgaagatacacgaaggagtgaaaaacagccgggataaatcgctcggcacatcacactccatcgcattcagcgaactgaatctgaaaccacaagtgagcatgtctacatcagccgctatcctacccgactccaaaagtttgatcatcccgttccgggcagtcaatctctatgcggtagatttaagcgtaatccgtatttttgaaaacaatgtactgatgttcatgcagaccaatacgctctcatccgccagtgaactgcgccgttccggacgattggtttaccaaaacacattgtggctgagtaaggacagcacaaaagacgtgcaccgatgggaagactattcaatagatcttgccggactgatccggcaagaaccgggtgctatctaccgtgtcatactctctttccggcaagaatactcagcctatccttgcagcggaacagaaaaacaagagatgagttttgcagacaatgctgcgtcagagggattgacgaaagtcagcggaagtagtactttcgaagaaaatgaagcagaatgggatactccggaaacttatttctactataatggtaacattaagatggattggagtcagtataactggcgggaacgcaataatccttgccatgcttcctactatatggattctgaccgggcagcatcgtgcaacgtatttgcctccaatataggaatgattgtaaaacggaattcactgaacaaactgtggattgccgtaagcaacatcttggataccaaaccgatggagaaagcaaaagtgactgtttacaacttccagttgcaagccatcggaaccgctgagaccaatagtgaaggatttacagaaatcactccacaaggtgttcctttcattgtggtggccgaagtagagaagcagaaagcttacgttcgtgtggcagatggcgaagaacaatctgtcagccggttcgatgtaggcggaaaagatattcagaaaggattgaagggattcgtctatggcgaaagaggggtatggcgaccgggagatacgctgcatgtaagctttattatggaagaccgtgaaaaaaggattccggataaacaccctgtagcattggaattgtataatccgagaggacaattctataccaaaatgatttccacgcaaggtataaacggtttctacacatttgacctgccgacacgtccggaagacccgacgggattatggaacgcttacgtcaaagtaggcggaaccgctttccacaaaagccttcgcatagaaacggtgaaaccaaaccgcctgaaaattaatctgaaactaccggagaaagcaatccaggcttctaccaaagaaataccggtaatgcttacttccacatggctgacaggcgccaccgcttcacggttgaaaaccaaagtggaaatgtccctgtcaaaagtaaatacacaatttaagaactacgggcaatacatatttaataatccggctaccgaatttacaactgtaaaaaacgatatattcgatggaacactggatgcggaaggaaaagctaactttatgttgaaacttccggctgccaccaatgccccgggaatgctgaatgcaaccttaaccagccgtgtattcgaaccgggaggagacgccagtatttacacgcaaagcattccgttctctccattctcttcttacgtagggattaatttgaaccaaccgaaaggaaaatacatcgagaccgatcaggatcatgtattcgacattgtcaccgtaaatgcggaaggacaattagtgaaccgctccaatctggaatataagatttaccgtatctcctggagctggtggtgggagaaccgggacgaatcattcggaacttatgtcaacagtagttccatcactcccgtagccagtggcaatatacagactacaggcggaaaggcaacttttaaattccgggtaaattatccggactggggacgttacctgatttatgtgaaagataaggaaagtggacatgccaccggtggaactgtttatatagactggccggattggcgcggacgttcaagcaagacagaccccagcggcattaaaatgctcgctttctctctggataaagactcgtatgaaataggtgaaacggcaacagccatcattcctgccgctgcgggaggacgtgcattggtagccctggaaaacggttcaaccgttctgcaacgtgaatggattgaagtttccaacaacggagacacaaagtattctttcaaagtgactccggaaatggcgccgaacgtttacctgcacatcagcctgttgcaacctcatgcacagacagtgaacgatttgccgatacgtatgtacggtgtggttccggtattggtgactaataaacaaactatattgcaaccgcaaattaaaatgccggaagtgttgcggccggaaacggacttcaccgttaccgtcagcgaaaagaacggcaagcagatgacatacacactggccattgtagacgacggattactcgacctgactaatttcaagactcccgatccgtggaatgaattctatgcccgcgaagcattgggcatccgcacctgggatatgtatgatgatgtactcggagcatctgccggacgctacagttcattgttcagtacgggtggtgatgagacattgaaaccggccgatgcaaaagcgaatcgcttcaagccggtagtgaaattcatcggtccgttttatctggataaaggaaaacagaagacgcacacgctgaaactaccaatgtacgtaggttctgtgcgtacgatggtgatagcggggcaagacggagcttatggaaaagcggaaaagacttctttcgtacggacaccattgatgttgttgtccacactaccccgtgttctgagcacacaagaagagattaccgttccagtaaatgtctttgccatggagaaggaagtgaagaatgtatcagtatccatccaggcttcaggtggaggtgtgcaggtaatcgatcccaataaacaatccattactttcagtcaaccgggtgaccaactcgtttactttaagataaagaccggaagtaaaacaggaaaagtaacgatgcatatcactgccagcggtggcagtcagcaggcgaaagagaccattgaaatcgaagtccgaaacccgaatccggcagtgactttccgcaacagccaatgggtggaaaaaggagaaagtgtaacacttccttattcattgaatggtgcttctccggcaaatagccgtatgctgctggaagtctcacgtattccttcggtagatatcagccgcaggttcgactacctgtataattatcagcatcattgcacggaacagctgacttccaaagctctgccgttattgttcgtcagccagtttaaagctgtggatgagaaagaagctcaaaagattaaggctaacgtacaggaagcgatacggcaactctatgcacgccagcttccgaacggcggttttgtttactggccggggaatgccagtgctgatgagtggattacttcttatgcgggcatgttcctcgtattggcacaggagaaaggctacgctgtcaactcgaatgtactgaataagtggaaacgcttccaacgtgctgctgcccaaaactggcggatgccggatcaagatgacagttggggttactggcaaacgggagtgcaacaagcatacagattgtacacactggcattagccggtgcacctgagcagggcgccatgaaccggatgaaagaacaagctaacctgcctctgcaagccaaatggagactggcagccgcttatgccctgacaggtaagatgaaaccggctgaagaactggtatttaaggcagaaaccaccgttaccccttattcctcacagaactacatctatggttcgtatgatcgtgacgaagctatgatattggaaactttactcctaatgaaccgagaccaggcggcattgcaacaggcgaagaaggtatccaagaatctggctgaagagaattggttcagtacacagtccactgctttctcattgatggcgatgggacgcctggctgagaagctttcaggtactttggatttcacctggacttggaacggaaagcagcaacccatagtgaaatcagccaaggctgtatttgcaaaggaactgtccacttcaccggcttcgggtaatattatagtaaagaatgaaggtaaaggtgcattaagtgtcgacctcattacacgcacgcaattacttaatgacacgttacccgcaatatccaataacctccgcctggacgtaaaatatacggatatgaacggagcgacaatatctatagatgatatcaagcaaggaacagactttatggcagtcatcactgtaggtaatatcagtggaaccactgcttacagtaatttggcattgacacatattctgccgtcaggttgggaaatttacaatgaccggttgatgactccggaagcgacacctacccgtgagtatacctatcaggatattcgtgacgaccgcgtattgacttacttcgacttgcgtcgcagtgaattgaaaaagttcaccataagactgcaagctacatatgcaggcaatttcattttgccggctatccagtgcgaagccatgtatgacggttcggcacaagcacgaaccaaggcgggaagaacgactgtcagtaagtaacatgccactgagcaaaactatccaaattcccctccttctagaaggaggggtgcccaaagggcggggtggtaggtaagaaaagagttccttattaattcataggtatttttcattctacctaccacctcccccctatggggtactcctcctcccgggaggaggagaattaagatagtcatatttaaatattgatgaagattcaaattataaagtacttcaaacaactgtctatcaccagaaaagtaatactcatacttattacaattctggtgataggctatatcttttgcctcccccggcaacttttccatgtgccctactccaccgtcgtcactgaccggaacggtgaattattgggcgcacgcattgcatccgacggtcaatggcgctttccaccccggaccactactccggagaaaataaagcaatgcctcatcactttcgaagacaggcatttctatcaccattggggagtcaatcctgtctccattagcagagccgcctaccaaaacctaaagaataagcgcattgtaagtggaggaagcaccctcaccatgcaaacgatccgtctggcaagaaacgaatcgcgcacttttggagaaaagttcatagaaatgatcctgtccacccgacttgagtttcgcgcttcaaaagagaaaatcctgtctatgtacatctcacacgctcctttcggaggaaacgtagtagggctcgatgccgctgcctggcgatatttcggacatcccgccgaagaactgtcctgggcagaagcagccatgctggcagtacttccaaatgcacccgccatgattcatctctccaaatcacgacaattattacttaataaaagaaaccgtctgctagaacaactatatgcacgaaagattatagatgactccacttacgaactggctatcagcgaaccactccccgacgagcctcatccactcccccaaaccgctccccatctagtcagtcgcttctatcaggaacgaaacggaaaatattccatatcaaccattgacaggggtattcaaacccaaatagagaacgcagccgaacgttggagcaatgaatttaaccggagtgatatacgcaacctcgcaattctggtgattgatatccgaaccaatcaggttgtagcttattgcggcaatgtcaatttcgaacggaagcaagccggtaaccaagtagatgttattcaggcacccagaagcacgggaagtattctgaaaccatttttatattacgccatgttacaggaaggcagtctgctacctcatacgctactgcccgatataccgattaatattaatggctttacacctcaaaacttcagtttgcaattcgaaggtgccgttcctgcttcggaagctcttgcacgttcattgaatattccggcagtgacgatgttacaaagatatggtgttcccaagtttcatacttttctgaggcaaataggcttaaaaacaatcaatcgtccggcttcccattatggtttatcactcattctgggcggagcggaagctaccctgtgggatgtgacaaatgcgtatgcttacatggggcggagtttattgcagcttccacaaacagaatgtagtttgctgcttgcggacgctgaaggatcaggagaatcagaagtcttcgcttcgggaaaatcgacggatactttccaaccgggagccgtatggcaaaccttcaatgcgttaaccgaggtgaatcgtcccgaagaaatagactggaaatcaatcccctccatgcaccccattgcctggaagaccggaacaagccacggattccgcgatgcctgggctgtaggagtcactcctcactataccgtaggtgtatgggtaggaaatgctacaggagaaggtaaacctggtcttgtaggagcacggacagccggtccggttttgtttgatgtatttagtctgctacctccgacacggtggttcaaacgcccgggagatgtcttcgtcaaggctgaggtatgccggaaatccggacacttgaagggtaggttttgcgaagaaacagatactttactgattcttcctgccggactaaagacggaagcttgcccttatcatcacctgatcaccctttcagccgatgaaactcaccgtatctacgagaattgcgcaaatttggaaccaactatccagaagtcctggttcactttaccacctgtatgggaatggtattacaaacaacatcatccggaatacaatccgcttcctcccttcaaaacaggctgcggagaggatgcattgcaatccatgcaattcatctatccacccatgaatgcccgtattgtgttacccaaacagatggatggaagtccgggctttctaaccaccgagttggctcacagcaatccaggtaccaccattttctggcaccttgataacacttatcttacccagacacaagactttcataagatctcactacaacccacgcccggaaaacattcactaacagcggtagacgaagcaggaaatacagtaaccactacattctatatcaattaaggttatctgttgatgaaaccggtcagcataccatccccccgaacaggtgatgtttttgtacaaaaagattccattttagtctttttaatgaaaatacctaaaagaagtgagtacatagttaccaaaaagtggctacatttgtatcccgaaacagtgtcagaagaaaacaccttgttccaaaaaacaaccccaacactagaattagtgaacattgttttttgtatatttgttaaatcttagaagcgacaagctttaatcaatttattaataccaattaagttatgaaaaccaatcttagttctcaaatcactctcaacagagtctcccccaggtattataggcctgagaatgcatttgaaaggtcggtattgacccgactggaaaaaatcccaaccgacatctacgaatcggcagaggaaggcgccaaccacgttgcctacgaaatagctcaacttattcgtgataaacagaaagccggacgtttctgtgtattggcattgccgggcggtaattctccccgcaacgtatactcagcccttatccgtatacataaagaggaaggcttgagtttccgcaacgttatcatattcaacctttacgaatattatcctcttacatcagatgccatcaacagcaacctgaatgccttgaaggaaatgttccttgatcatgtagatgttgacaagcaaaatatctttagcccggacggtacaattcctaaagataccatctttgaatattgccgcctgtacgagcaacgcatcgaaagtttcggtggattggatgccgtattactgggcatcggacgcgtaggtaacattggtttcaacgaaccgggttcccgcctgaactccaccacccgtttgattttactggacaacgattcacgcaatgaagcatccaaaatgttcggtagcatcgaaagcactccgatcagctccataacaatgggtgtttctacgatcctggctgccaagaaaatctatctgatggcatggggtgaagacaaagccaaaatggtaaaagagtgcgtagaaggtgcagtaacggataccattccggcatctttcctgcaaactcacaacaatgctcatgtagttatcgacctttctgctgccggtaacctgacacgtattcaccgtccgtggctagtgacttcctgcgaatggaacgacaaactgattcgtagcgccatcgtctggttatgtcaactgacaggcaagccgatcttgaaactaacaaacaaggattacaatgaaaatggtttgagcgaactgctggctctgtttggttcggcatataatgtgaatatcaagatcttcaacgatctgcaacacaccatcaccggatggccgggcggtaaaccaaatgcagacgatacttatcgtcccgaacgtgcgaaaccgtatccgaaacgtatcgtcgtattctctccgcatcccgatgatgacgtaatctccatgggtggtacaatccgccgcttggtagaacaaaagcatgacgtacacgtggcttacgaaacttccggtaacattgccgtaggtgacgaagaagtaatccgcttcctgcatttcatcaatggtttcaaccagatcttcaataatagcgaagacaaggtagttgttgataaatacgcagaaatccgtaaattcctgaaagagaagaaagatggtgacatcgatacacgtgacatcctcacaattaagggcttgatacgtcgtggtgaagcgcgcactgcttgtacgtacaataatatccctctggatcattgccacttccttgacctgccgttctacgaaacaggtagaatacagaaaggtccgttgaccgaagctgatgtggaaattgtgcgtaacctgctgcgtgaagtgaaacctcatcaaatattcgtagccggtgacctcgccgatccgcatggaacacaccgtgtttgcacagatgccgtatttgctgctatcgatctggaaaaagaagaaggtgcaaaatggttgaaagattgtcgtatttggatgtatcgtggtgcgtgggccgagtgggaaattgaaaacattgaaatggcagtgcccatcagtccggaagaactgcgtgcaaaacgtaattcaatcctgaagcaccagtctcagatggaaagtgcaccattcctgggcaacgacgaacgtttgttctggcaacgcagtgaagaccgtaaccgtggtaccgccgcattgtatgacaatctcggattggcatcttacgaagcaatggaagcattcgtggaatatattccgctgtaaatgtttgctaaatagaaagaaaaaggttgcaatgttttgtcactgcaacctttttccattctacattttcattaattttattttcacgtcatctccatctcatcaatattttcttcataactatgattttgttccacaagtcattcagagaacatggcaacagtccctttatattcgccttcgggcaatttgatttctcttttatttccattaaggatcacttccatggatgtttctgtctgagttggatctgaagcatacactttccactttttcttataagtacgcagaataaaaagcccttttttattgctttcaaactttagttcaccggataagggaacacttccagcttcatacaatgcaagtaaatatgtctctttatttagttggactgcctgacattgactggtattactaattattttaaatgaagataaatcaaagtgttgtacttccttaggagtggtagccggcaatatcacgtattgatatgagtcattttttggaagaattccatgattcatataaatagtaaacacatctttcgtctgcaactcgcttttaggatatatcttcatgatatcattccaagaatttgtacgctgttcagagaaaatacgcccctcgccttccaacaagatgtatccggtctgatggtgaaaaaagcgctgggaatccccacaggaaaatttcaaatctttcacagcttcccactttcctttattccaatacaataaatcatctcttagtacagcctgctccacagaagtattcacctgataactgctatcagaacgaatgcccgctcctaagcataagacataatctggtgtaaaaatccacgtctttctagcataaagcccgtcccttaccaaatccatcgaagtaaggccaatagtgccatcattcacatttcccacaaatgagcctttattttgcttttcaagccatcccattacatggacagccttatcttcctgatagcaagtcacaccaggcactttacgccaatcccaacaaggaaatatatccgtatattcatcaccatccacataagtgtagagagcaccgtctgccaaataataaccttttacgttatccgtacccgactctgtgccgatcaccctgtccgatgccattcttacagatgccatccaagtgggacaacgatggattgtcatatcagatttccagaaatggtattgtcccaacaacgcagttgatgtattcccaagattttcatcaatcaacatatgatatacattacaatctttactattcacttgcgccaatgcattagcagagaataagctcgaaaaagccttattccgctgtgcctgccgataaagttgccttccaagattattcacatccatcttgtttttccacaagattctccgcacaccttcattcgtatagttagtgataagcttaaaacgctcttgatccaacgctaatgaagtgccgtcaagaatatatgcccaaaaactcatagtagccaaataagctgcaccataattcccgacctgctgttgaggtccgtgttgatgaaaactataatcgaccttgatcccttctgctttgccataagctatttttatctcatcattcatggcattccttgcttcctgtaccagttgaatatcatttagcaatagtcctttcaccaatacattgccagctagccaaactctattctgggccgtcatccctatctttgcttggttcatcacttcaatagcatgcttcttctcttccgtcgacaactggtcttcaaataaaacaaatgcagctcccaaaactttaggtatacctatttcattataccaccaattggcagctaccggcttcatccggaaccaataccccatagccttatgaatggcctctgcaatctcagctgatttataaaaggtatgttccgaattagcataaactttagccaactcaagcacacgggccgcatgaatccgcggaagccaactggcagccttactattagtgaaatcgagcccattccaactaccttgttcactcaaatcagataataattgacgaacgtacccaacttctatcgggcaacgttccattaattctacaaccatctggtcaccgactactttctcatgggacatctgacacatcagtcgtatcaactgctgttctgatttattcttatataatatactctctatatacttctgcctgatgacggataaatcatccgctttcagtcccaaagtaaatccccaaagcaataggataaaaataggacgtactacatgtaattccatttatttttttataagttcaaattccgttgcttttaaattatccgaactgcttccgacaaagagtttaaagtcacccgactctgtgacgaactgtttatctgaattaaagaaacctagttcttgttcagacaaggtaaattcaatctttcgggtttctccaggtgccaattctacctgccggattccacataactcaataaccggacgggtcacagaactgaccacgtcctgtaaatagagttgaacggtttctttgcccgtatattgccccgtattcgtaacagaggtagtcagcactactggctctcctgctttatattcttttttcgacatcacaggagccgctatttcaaaagtcgtataactcaagccatatccgaacacataggcaggtttcacactctcatccatataaccgcttacccacggattgttaggcgcccaggcacgtcctgtacttttatgattgtaatatagcgggcactggcctacgtgacggggaaatgtcattggtaacttaccagacggattatatttaccagtaagcacatccgcaatagaattgcctgcttccgtaccaagccaccaagtcataagaatagcatcggcataaggttccatatcggagaaaatcaatggacggcctcccataactaaagtgataacaggtttccctgccttctcctttatttgtttcaccatcaactgctgattagcattgatgttgatatccactttcgatttcgcttctccagactccatcgcacgctctcctactgatacaataatcacgtcatattcagaaaaatccggtaatggtttcaattcattcgtttccaaatcataaccttcaatataggtaattttagcttttggtaaggccgctttcagaccatcaaaaacagaaattacttcttcagcctttccaatggcggaccaatttcccagcatatcttttttggctttattcaaagggccgactacagctattttaccagcagtggatgtaacaggcaaaacattttggtttttcagaaggacgactgaaccagccccagcttcacgagccactttcctgtgagcagcatttactttcttgttttcgatttccctttcacgatagttataacgataaggatcatcaaacaagcctaattcaaatttcactgtcaaaatccgctttacagcatcatcaatcaaggtaatgtctacagctccctgttttaccaaattgaccaaatgtctggcataagtcatagaatgcatatccatgtcacagcctgcaatagcggccaaccgaccggcatcctcattatcttttgccatccgatgcttggcaatctcaccaacagagccccaatcactgactacaaagccgttgaatccccattctcctttcagaatatctctcaaaagaggcttatgggcagttgccggaataccgtttatttcattaaaagcattcatgaaagtacccactccggcttctaccgcagcccgaaatggtggtaaatatacttgtagaagtgtatgttccgagatatcagcttcagcataatccttacctgctaccgctgctccataagcagcaaaatgcttcgcacaagcaagaactgtgtttctatcattataatcagtaccctgaaaaccttctacacgagcctttgccacctggctaccataccaagggtcttccccagctccttccatcgagcgcccccaacgggcatccctagaaatatcaaccatgggagcaaacgtccagtgaattccatgggcagaagtctccgctgctgccacacttgccgttttttttatcagctctagattaaaactggcagcctcagccatcggtatcgggaaaatggtcctcatcccatgtacaacatccaaaccaaaaattaacgggattctcaaacgggactgcatagccaaatcctgatattgctttgcacgctctacagtcaatatattgaaaatagaacctacctcaccacgtttgatttcttccgtatgattacgactgtcaagggaaggaccagtcagaagcttattattggaatactgaatcatttgtcctactttttcttccacagtcataagcttcagtacagaatctacctgatgagtataatccttcttcactgtctgggcgggcaaagtagttgccatgatacccaaaattattgcacataaaagactattctttttcatatcatcacttattattatagaactctttcatcacataccaagcctttttcctaaatccctgatcagaaataagccctttccgattccaaccttcctgattcgtaggatgaaaacgatacggagaacggaaatcaaatagtatccagggagagataccggccaaatttttcacattgttgaacatctccagattatctctaaacagcttttcctgatattcttcgctccatgaactggttaccgtagaatctcccgattgcccgtaaagggcttcaccaccaaattcagaaaaaatcaacggtttaccaggagccacattccaacacacttccgaaggatctgacggccaggcatgataccaccccatatatttattaatcgatactacatccaactcttcgataaaagaatcgttcatttcaaaagccttcgtttcaggatttagtttcggcaggtcgaaagctgctgttatcagacgggtagtgtccatctcgtgacagtgctcgacaagactcttcagaaaagcattgcgggcttcggaaggggccgtttcattggcaactccccagaaggccaaggcacacctattcctgtcacgcataaccatttccgtatacattctttgcgccttcatacgcgtcccggcatttttaaaatcaattccttgccagataggaatttcttcccataacataatacccatcttttcagccagacgaacgatgtattcattctgcggataatgtgccagacgtactaaattggcacctaattcctttgcttcagaaagtaatgctacagcatcctgctctgaaaatgctcttccctggcgttgcgctatctcttcatggaaactgattcctttcataaagatcggagcgtcattcagataaatcttcgtccctttcacactaagattacgaaagcctatattctctttcacatgatccgttgcagaagaaactgtaacttggtaaagtttaggtttttggggcgaccaacgttctaagttctttgcacggaaagatgttttcgctattccttgtccatcagtctgtacttcagatgcgattttcagttcaggaatttcaattctcactttctgacccgctttccgctctgacagttgcaagatcgcatgaatataatccggcttgtatttatccagttgtataaagtaattgctgatatatactttaggagtatgtaccaacatcacatcacgcgttatgccgccataattccaccagtcaaatgacagcgcaggaattgcatctaccgtccgagtattattcacttccacagccagaaaattttctccttctattatcaaatcagtgatattgaactgaaatggcgtaaatccaccttcatgactacctatctcttttccattcagatagacccggcaacggtaactcacagctccgaagtagagaaacagattctcatcctgatttttattcaccttaaatttgcgggcataccacaccgtaccttcataatatttaagttcaggaagctgcgaattccaatcggaaggtacattcaaacgtaaccctccttcgaactcatactctttaaagtcagccttatttctcaaaggtctgttcttatagatagaggttcgccgaccttgctgataaggatcaataataacattccactttccattcaagaaagtatattgtctgccatatacatttgtcagtaactcctgagcaccaacgtactggccattacagatagttatcagaaataaaatccaacctaaaaatttcttcttcataaatatttctctattactttttataaattttcattgcacatcctccaccttctgccaaattcactgttagtttacgattttggggaacaaagataacagacttccgataatcagaagctatcttatccgcatttataccgtccttataaagctcaattgtccatttaccttcacccagaaatgacaaatcaaattccatcgtacgctttttccagttagtcaacgctcctacataccaaacatctcctttacgacgggccattgagatatattctcctatttttccattcaaggcccttgtctcatcccatactgtcggaatatctgaaatataagaggtacactcagattcacgctcatagagaacaggactatcacacaacatagatagcggagcttcgaatattacatattcagccagctggcggcaacgggttcccatactcataggttcttcattaacagcacgaaaattgcgtttattgccatttttcattgcgccttgagtataatccacaggtcctgcaatcatacgaatgaaaggcatagtcacatcataggtaacctgatccacattctcactgccagagaactttaactgttccaagccatgtacgccctcaaaattaatcacattcggataagtacgattcattcctgtcggcttataagtgccatgataatctaacattaaatggtattttgcagctatctcagccccacgatagtgaaaatcaaccattgcttgatcgtcacggtccatgaaatctaccttgaatcctttaatacccaattccgaataatgtttgcagattctttccaaatcacgttcaaaagcataataaccagcccacaaaatcagccctacatgtttagaatcagcataagcaaccaactctttcaaatctatttccggcacaacctgaaataaatcagcttttagatttacggcccagccttcatccaaaatcacatactcaataccatgcttagaagcaaaatcaatataggctttataggtaacattgttcacaccagctttgaaatccacaccggacaacccacaactgttccaccattcccaagccaccttgccaggcttaatccatgaagtatcctccaagcgggagggagcagccagtttataaaccatatcattatcaaggagctctttatcatcagaagatacaatagcaatgcgccagggaaaacttcgtctaccggaacacttcgcaatataatcttctcttgcagtaaccagtttttgtaatttgttgtgcccaccttgtaccgtttctttcggatacggagcaaaaacacctttcaaagaattagactgattcgcattgcgaacaaacatgccaggataactctccacgtctgattctgcaatacaaagcttctttccatctttcaactccacaacaaccggagtaaacgccaattgattagtacccatttcacttagattgacatgtgtatagatattctcaaaagaattgaagaactggtcttccacctttttattttttcctcctctcacatagggaatatacaccatataatcatcgtcaaaattaaatgtagcttcttcagctattacattaaaaggcttattctccgtaacgacgaagcgatatgcaactccttcatcataagctctgaattctaattgaaatccatccctgaaagtaagagacagctcattgcaacgatttcttatctcactccgtttgtaaatggcagtagtgatattctcatcaatcacacgcctacgtatattcttaactttagacttcacgcctaatattttattattgcttaatgacatggaaatcggcgaagagacaataatcgctgtattttcatgtcttaaggaataacaaatttgatcatcggcttcgatacttagttcaagcttcccattcggtgactttaactgatattgtttttgagctatactaaaactcaagaatgcactcagaaatgtaagtgtcagacaaaatcttctcataaatcgattttattggtttaaagtgatattttgattaatactaaattaaataatgcgtcacaaatatagacatttacttaagtccggtttactgtttatgtatgaaaacaccgggaacgtttgcaaattcactttcacattaaaacactatatacaagacgtttatctaatacatgaagcacgaaatcgtttccgataattttatctgcacatctattgtatatgttatagcattcacttactttcgcataaaaaataatctaccatgaaacatttattatttatttttctatttgcctctttaagtgtacaagccaaagtgacattgccagccatctattccaatggaatggtactacaaaggaaccagcctattcgtatatggggacaggctgatccaaaggagaaaatacaaattttattcgcagagcaaaaacaaacggcaaaagccgacgccaagggatactgggaagttaacctgaaagctctggaagccggaggtccctatcaactgcaaatcaccggaaaagacaaccaaataagtatcaaggatattcttatcggagatgtatggttatgtagcggacagtctaacatgcaatgggtagtaaacaacgtcactaatgcggaagtggagaaaaagaatgccaactattcacaaatccgaactttaaacatacctcgccgcatggaattatcccctaaagatacaatcagcacaacatggctcgtatgttcacctgaaaccgtaggtcgtttctctggagtggcttatttcttcgctagaaaggtttatgaggaaacaaatatacctattggtattataaattcatcatggggcggtacaatcgtagaaacctggacaagtctggaagctgccaatacactaccacaaaaacgactagaccgatataacaaaaacgagaaactatccccccctacagaatactttacacgaacaaataaggaagcaaagcgtaatgattatccatcattggtatacaatgcaatgatccatccactgctatccttcgccattaaaggagtcgtctggtatcaaggagagaacaatgtaggaaatgcagaaccttataccgattggctcacatgtatgatcagtgactggcgtaatcgctggaattcagaattaccgttttatatcatccaacttcccaacttcgattctactaacaagacaccactttgggcggaaatacgagatgctcagcgtaaagttctaacagttcctaaaacccatctcattgttaccagcgacttaggagatccgcatgatcttcatcctcgcaacaaacaagaagtaggtatgagggtagcattacaagtgttgcatcacgagtatgggcgtccggatattgtcagtgaaagccccatgttcgaacgtatggaaatcaatggtgacaaaatcataattacattcaaaaatacaggttccggtttagaaatacgcagccgatatggatgtctgcaagggtttaccatcgcaggagaagataaaaaattctactgggcacagggagaactcaaagataatcgaattgttatttggaatccgaaagttcctaaccctattgctgtacgctataactgggagaacaatccggacggaaatctttataataaggatggcctaccggcttgcctattccgcacagataattggtaaacattatctattattcacattgctaacaaatcaaacggaattatcgttttaagagaactgctcctaaagtttcgtgtctaacttttgggggcagttctaaattgtgaggtacagtttatttttagacggccttgttagccccaatatacatttccaaatctttgcacgctgcaatcgactctataaacgaataaatcaggtgttcttatacctctccttatatactttaggagaaactccataaacactcttaaaataatcaccaaaatgattataactgccaaatcctgtttgataggcaatttccgttgctgtctgttgagaagtacgaagcatctcagcagcacattccaaacggatattacggatcaattctgccggagaaagattagtaatagcctttaccttacgatataatttagctctgctcactcccatttccttgcataacatttccacatccaactctggattagaaagatgtgttttcaccactgcctcatattgttcagcaaaagatttatctgcaggttccaactcaatgcctacactctttaaagagagttgttttccataaatctccttcaatttcttccgaccgctcagaatattattaatacggactatcaaggtagagactttgaaaggtttcacaagatagtcatccgcaccggcctgaaagccttcttcaacatacatggtcatggattttgcagtcagcaatatgacaggaagatggcaaaaagaaggattctctttaatatacgtacataattccatcccatccatttcaggcatcatgacatcactcactactaatgacatattttctttgcctaatacctccaatgcttcacgtccattctgggctgtaataactttaaagtttcgcgacaattccttctgaagataagtcagaatttcaatattatcatctaccaacaaaatcgtctcagaaatcgaagtaactttaaaagaagaagcatcgtctactgcatcttcactctcatctaatgtgtcttgaaccgccacttcataacatttatcatatctccacggcaaatcaatagaaaaacaagtaccatgcggttccctgcgtctgaccgatatagttccctgatgtttttctacaatagctcttgctatggtcaggccgactccactacctcccatctgtccatgcaaatcctgatgagacagtgcaaaaggtttgaatatcttgtttatatcctcattggatatgccgactccggtgtctttcacttcaacatgtatttgcggtttctctccttcaatcagggaaacagccaaaattacagttcccccctccggagtaaacttcagggcattggacaataaattaaagaacactttctctaatgcgtccttatcaaatgtagctaatataggtgtctccggtagagaaagctgcaatgctatatctctttgccgggcagtaacctgaaaagagtaataaatctcctgaataaaatcattaaaattaaaagaagataattccagttccccattgccattttctatcttcctcagatccatcagatcatttaccaacgtgagtaatcgtttggcattacgacggattaacagcaagtcttcttctactccagaaacatgtattatctttttctgtatctcgtccaaaggattcagaatcagagttaacggagtcctaaattcatgcgccacttgcgtaaaaaaggtctgcaattcccggttgaactcctcagatttatccttttcaatttgtttgaggtacagttcgtgctctaaccgttgtttcctttgcttataggtaatataacgttgcaatatgtagaaaataatagcagcataaatagcaaatgcccaccaacgcgcccataaagggggaagcacttcaattttcaaatgagtttccggccctatcgttccatcattattaagtactttgatccttaaaaggtagttaccggaggctagattactatagaatacttcgcgacgattacccgcatccacccaatccgggtctactccatccatcttataaaagaaccgatcgctattaccatatatatggttatcactcgcataggctattgaaatgtttgtctgattgtgttttaaacataacatggatgtctcagccaaacatttatctaacacagaaccttcacaaggtctttgcaatttattattaatacgtaacgtagtaagaatcacagaagccggtatatcattcaacataaaattccgattatctaccattatatagccggtattacccaatatccaaaaacgattggctgaatctatcagactggaggcatccatatcggtcagacgcaaaccgttgttattatcaaaagtatgtaattgttcttcttttggatcgaacaaatacaatttgtgtgcaccaattacccataacctctcttcattctgtttggcaacgaaataaagtttatccgaatgaaccttggtatgcgacaaatgttgctttcgcattttccaatgtttatctacagataagagtccctgtctctcagtcgtcatccataggttatgttccgaatcacggcaaaaagaagttatactaagcgatttatctgcaggaacccccaaatctgccgcacttatctgtttcttttgtcctgtattcagattatagacatacaatccatctttctgggtggcaaacacaagtattccaggatctatctcatctatgtaattcgagcatgggaatcgcacggaatccatattcagacagaaaacgccctgatcctgtacggatatccaccaatgtcctttagagtctttgaaaatatacaatatatttgtattatcgtatttccgcaataatgagaatttattcctctttatagaataattatagacttctccccgttgattaccgcacatgattgtatcaccggatatacagatcgatttaataatattatcattgtgatgcttgttttcgttcaaccaaaaagattccacttggcctgttttcggacgatgacacagcaaaccgttaccttctgttgcgaaccaaatattattatcagcatcttcttttgccatcctgaagcgtccagccaaatgagaaggagcaaagaatctgaagcgctgattatagctgtgactgtagttcacaccaccggcatatgtaccaacccacactattccttgcctatccttaaacaaagaatatatagaataatagctcaagcctccttcttccccgatttctcctttttctactatcacttcctccatattatccttatgtaacctaaatagaccgttgaaagtgccaatcaacatatagtccttattcaactctatgatatccctaatctccttattaaggagagatgtagaagaaagcttataagttttcacttccttggtcttaggattatatttgttaatacatatacctacgatcacgctccaaagacaaccttctgaatccacccgcaacacatttatcaatccgtcagtcaaggggcctttctctatggacttgggataaatatgctcaagcaattgccagttttcatcatatacaataatgccatgttggcgagtacctacataatatttcccaccagcctgcacaaatgcagaatatcgatattcctccggagcgtcctgcagaaccacaagagtatctttttccatatcatatctgaatattttcttttccgtataggctaccaagctctcctctttatcaaccccaatcccaacccaacggctactttggttcttgtcatacaggaaactttttacttgctgagtagaatatttcatcctgtccaaaccattttcatgcaatatccataaattcttatccctgtcctgaatgatgcggcgtattttattacctccaagagtgggttgggtattagtactaaaaatatcgatacgctgtccgtcataacggtttaaaccattatcacttcccaaccagataaaaccatccttatcctgatatatggattgcacataattatgagaaagtccgtcttcggtagtcaaatgttcgaagaacaatttgtcggttaaaagctgggcacttccactcgaccaacaaaaaaagaataatatcaatactatatatcggctaaacatgctgcaaatataccttttattccttaatgacacaaatccgggagtttctgagacatatcgtaaagtcctaatattcattgcattctaactttgcagcaacaataaagaaaataatattaaccctaataaagtaaataccatgaaatctcaagtaacacttaaaacaatcgctaaagcactaaatctttctacttccactgtatccagagctttggcagaccagtgggatgtaaattcgcaaacaaaagaaatcgtgatggaattggccaccaaattaaactacaagcccaatatcatggcagtgaaacttaaacaatgccataagaataatacggaagtctgcaaacaacctaaaattaccatcaaagaaatggcacgccaactcaatctggcaccatctaccatatcacgcgcattagccaataaaaaagatattagcctgaacaccagaaaggctgtacaggctttagccaagaagctacattatcgtccaaaccccatcgctatcatcttaaaacaacaacatactaaacgtgcatcagcataatctcatattaatgcgaatcaggagttgaaattgattcataacggtatagaaaggaataagactcaccacagattacacagattgacacagattttattttactgattattagattaataaatctgtgtgaatctgtgtaatctgtggtgaattaattcataaccgaaaaggaatgaatcaaagattgctgatgagttccttgctagtttactgataatcagctaatagtatttaccaaaagcttaccataagatgtaaaagcgtttaccaccgtatgtaacggcctttaccccttattgtaacgacctttacctcggcatgtaacagtctttacctcggcatgttaatggagttaccgtgtgaagtgaacaaagttaccatttggggtaaatagaatttccatgaaaggaaaacgactgtgtacttataaaggtgaagtaagataatccataacagtatgggaaggaataaaggagtgataaggtgatagggtgataaagtggctgcgctatatatcacagggcgttatcactttatcaccctaccactttatcacattttgttcataaccctatagaaacgtgcatatccagcggaatatattaggaaaaagcagaagttaaatacgtttttctctcgaaaagttagccttaaacaagccaactcttcgagagaaaaaactatgcaagcctatcccatagcctttttataacgtaacaatgcttctaagaaataataatcggcataagaaagtggtacatctacttcgctcttttctggaagattaccgacactatgctttagaataaaattacagttagttcccggttcagcaagataatgagatgaagcaagagttcgaagttgtttttcagctattgatagataattttgtcttgctttctcatccgtagcaaaaccactcagttccacaaaagcagaggccattattgcaccggctgaagcatcgcgatattcattaccgttaggagcatcaaagtcccaataaggaataccatcaaccggaagacgtgaaagaagcatatcggcaatattttctgcgtgctccaaatacttttcatctccggtcatacgaaacatcattgtatagccataaagcgcccaggcttgccctctcccccatgatgattcattggaataaccctgtactgtttgccggctacgcacatgtccatcttcagggtcataatctactagatgataagaagaataatctttacggaaatgatttttaagggtagtatttgcatgcgtacgagctacatattccaaagtatcattatcaaaggctttcgatgcaaacatcaataattccagattcatcatattatcaatgataacagggtatttccaaccacgacgcaaaaaatcccagctccggattactccagttacggaactaaagcgggtcgccaatgattgtgccccttgataaagaactttcttataatcttcatttcccgtaagacgaaaaccattaccataactacaatttaactggaaacctacatcatgatcattggtcacgtattgaatgggatccagcttcaacgtattcttttcggccaatgtcttcacggcttcattttgagtatactcataaatataccagagtgaaccgggataaaacccgctacaccaccaataaattgtcgaagatttaaatgtgctgtccgaagctatggactgcggtaaagtagtaacctccaaacgagtatccattgtcaaatactgctgttcagcaacggtaaatacacgtgccgtcaatacatccattgattcctgtttcgaacacgaaataaggaaaccaattaaacttaataagagccatttttctttcataaatcctttttataatttaattaataaacaattcatctgataagatttaatgtcactttcaacaaattcttccggtttgcgggaagatgggtttcaaaacctacacgcatacttcccggattaggttcatcaaaagcatagagaggttcattggaccaaagtttcatttcaacatcacctggtgcaatcacggtaagcaacattcgatgtccatccttagccaattccatttgattcttaccgatgatctttgcttcagccggtgttaccataatccaagttaccaaagcctctttttctcccgtaaccagttcatctttcacaatcagatcatcttcttcattcagataaatgatgcggacaactttttccatatcatcagcaaaaacgcttataagatctacttctgcccctttcatatcttcacttttatatattctgttaatagaagcatagctattcactaaatgccgcttattgtttatcgtaagcgtattatgtgccatattaccaagacggaacactccccaccgttgtccttcttgagactgatcccataaatttattcctctactctccagacttaagtaattttgcattccaagatctatcgcccagcgtattcccttcctttcataaataaatgaaccggcatccatatgtgcatgagaagttagaggagaacctccttttacggccaaatagctatcctctttactattccatccgccacgataaataaaaaccggagtctttccaccattatgccagaaatggcaggaaggcggttgtatattactcaaatcctgatgagcacaaaaaatcaacagacagggcaataaacgatcttctgcaaaacaaactgaaggattctctaaatattgattttctaaccatagtaaagataaatcccccattttcttagcaaaccaaaacatcatcatattacatctcactccattaacagcatccgaaaaattaaagtattcaccacttggagctgtcataaattccataaagcgagctgattccaaaaaaccaggatattcggacaatccggcatccgtccccaatgcactttcaaggacagcaataagtaacacctgaaaactggtaccgtatccccaataatgaaagccctccggatatcctccgtccggtccataagccgataaagctttaggattagtcagcaagcacctctctatgattttttttgccttatccggcacatcctcaaaaattgcaagtgcaccatacaataaaccagcattacaaacagaattccaattagaggctgccctgtaaaaccactcatctggagcagcggcatccaagcctttttctacaattgcgtcacgtactatagaacgtgtttccgattccaaatactcataaagccaatcataacctatggataatgccaacaccatttctcccacatccaaaaagtgagatggattccaatctggaaaacggcttaccgaaagcatttcttgtgtcgcacgataagcatacttttcttccttcgtcatacgataggcatatgaaagatagaaaatacgttttaataccaaacgggaaacactcagcaaccgcttcccttccataactcgttccgccatttgttggatgagtatctcatcagattcttccaatatacgcttatgaaccttcaataacgatggaaacgttgctattgatttctttacagcttcttctcctccttgcgttaataataaacgaggatgaggggttattctttcatagtccacaaactgcgcacacagaactaaagaataaaaagctaaaactaacaataagattattctctgtagacgaaatttataaaaaatggataaatatatcatcatattaattacttaaaagttcaacaacatggcaaatatcacaatattatagaataatatagaatcattatctgcaaaatcaacgggaacgttttccttaacaaaagctaactatctttctgcacaaggtatgcaaaaacatgtttttacataggaataatcaactatataacaagctattaacatcaaaaaactacaaaatcgttcccgatgattttcatcattctttgcataagttataatattatttcagagatttgcaagtgtaatcaaatgtataacataaagcaaatctaaaaagaatagaatagaaacaatattattatccagcaattttgaggttgaaaatcataaagttgcaatctgtaaagactaataaatatctaaatactaaattattattcagttatatgaaaaacaattcatcacatccatgcatgtggcagcaaggtcacaaacgatgctatcgtctggtccaatcagtagctctgactactttgttgggcattggtacagtacaagctggtcagcccttcattacgacatccctttcaatgcaggttcatagtgttgctccagaacaacaaacgggcaatatatcaataaaagggcatgtagtagataacaagggagaagtcctcattggcgttactgtcatggtaaaaggtaccaataacggtgtcatcacagatatgaatggtaactttaccattaccgcaaaaaacggtcaaacactggttctttcctatatcggatacaaagatgtggaagtcaaagtacagcaaagcaatctaaacattacaatgcaggaagacgctcaagcactcgacgaagttgtagttatcggatatggtacagctaaaaagaaggatctaaccggtgctatttcaaacattcgtccgaccgacttaaaagcagaaatgccccgtaatatgcacgacttattgcgtgctaatgctgccggtctgaatatttcagtcaacaacgaagcaaaaggtggcggtgacttcctgatacgtggtaagggtacgttaaaagccggttcacaaccgttacttgttgtagacggggttatttataatggcgaacttagtgaattgaaccccaacgacatcatttcaatcgacgtactgaaagatgccagttctgctgccgtatatggtgcaaaagcagcaaacggagtcattgctatcactacacaaaaaggtatagcaggcagtaagccagtgattaacgtcaatacaagttgggggttggtcactcctattaagagccgcaaactcagaaatgccgagcaatttcttgatttccgccaagcatacgaaatcggtaggcaaacggatgaataccttgaacaatatccgggaatgtataccgatccaaggaaacttaatggaatagataaagtagactggtataattatgaccagaaggataaagttacgtctgtatcagaagaagaactaataacgaaatggttgtcacgtctggatctatctacccctgaaatcaataattatttcaatggtaaactaaccaattggcaagatttgatgttaaacaatgcagtacaacaaaactacaacgtcagcattagcaagaaaggtgaagattaccaatactattggtctattggctatatggacaatgaaggtatcaaagatggtgatgcatttagccgtttcactacccgcctgaatctggaatccaatgttagcaagtatatcacagtgggactgaatatgaacttctccagccgtgacgaaagcgctattgctgtcgatactaaagctctgacatggttttctccgtattgtagtaatgatgttaacaatccagaaagtgctaaccagcactatcctaatggttcaaacaccatcgccaacccattctatgaccgtaaatatacagataagaaacaagtatacatgaatctggatggaactatctacgggcgtctgaatttaccgttcggtttctcttaccagatgaactttactccgcgtttggcttggaacgaaagttttgagcacaaatcagccaagaacgatgcctgggcaggagaaggaggctcttccttccgccagcataataaagctttcaactggcaggtagacaatgttttcaactggaaatatgagttcctcgataaacataaagtagaagcaactttcctagtcaatgccgaaaagtcacaaagttggatgactaagagcactaacaaaggatacaatccaagtgacgcattaggctatcatggcatccatttgggcaacaatcctactgcattgagtactgaccaatatactaccggcgatgctttgatggggcgtttgttctactcttttagtaataagtatatgttgaccgcttcggttcgtcgtgacggttactcagctttcggtatgatgaacccacgtgctacattccctgccgttgccttagcatgggtattcacagaagaaaaattcatgaagaaaacctcctcatggttaagctatggtaaattacgtttctcttggggtgaaaatggtaatagagacatcggtatctacgctgcccttgcagagttaacctctaacccaacttgctggatcgatggaaatggcaaattctataccaccacttatacgttgaaccaaaaaatgccaaatagcaagttaaaatgggaacgtgccaaatcatataatataggtttggacttcggactcttcggagatatcttaagcggttctatcgaagtatacaagaaaatgaccaatgatttgctcatggaccgtgccatcccacccatcaccggtttcagcaaagtattgagtaatatgggacaactccagaatacaggttttgaattgacattgaatgccaacatcatgagacgcaaaaactttgaatggagtgctacaggtaacttctcactcaaccgtcgtaagattaaacacttatacggtaacatgaagaatattcttgatgctgacggtaatatcatcggtcaggtagaagacgatgatatcactagcaaatggtttattggtgaggacccagaccgcatttgggattatgtaggagatggtgtatggcaacaagatgaagctgaagaagcggcaaaatacggctgccagcctggtgactttaaatatctggacttcaacgaaaatgggaaattggaccaggatgacaagaaacaccagaaatatacaacccctcgtttccgttggacattccgtaacaacttccaattgttcaatgatctggatatttcatttatgttgtactctttatggggtcactacggttcatatgctgatgccgccaacaataacttcgatgcttctatcagttgcggttacgatcagccttactggacaccagaaaatccgattaatgactatgcacgtatcggttcaaagaacttaggaacacattacgtaaacaagtcatttatccgtttggacaacatcacagtttcatatcgcctgccacaaaaatggacaaaagttgtaggtatccaagatttacgcttcaatgcatccattcataatgtagcagtctttgctcctcattacgacggttgggatcctgaatcaaatagcccaatgggaagaacattcaatttcggtattaactttacactctaatttgaaagaacaatgaaaaagaacagaatattcaaaactatcagtggtgtcgctttatgtacggtactactaaccggatgtagcgaaagttggctggaacctaagcccctctctttcctcactcctgaaaatgcatatgttgatgctgacggtctgctcacttctcttgcagcagccgaacgttccatgcgtcatgaatactttggaaacggaagcggatatacttgtgaacttatcttctccgatctctgtatcagcggaacaactgataaagcaggccccttgcaggatatggatcgccaattaatgccggatgctaactttaataatgcggaaaactcctatttgacatcgcacaactgggatgagaactggaatcaaataaaatatacaaatgtagtactttcacgtatgaaagatactaaattcgtcaatgaagcagaaaaaaacaaagtattgggtacaggttactttcagcgttgttacagatactggcgactgatcaaccagttcggggatgtccccttcattgatgttgaagtcacatacccacggtatgattttaatacatgtgatcgttggagtatcttacgtcgtatgaaaaaagaactggaatttgcataccaatgggtacccgaacaagtagaccgtggacacaccaccaaatcggcctgtggagtactgttgatgaaagtctatatgtcattgggggaattcgacaatgctatcaaagttggaaatgaaatcgtagctaaacacccactgatggtaaaccgttttacttccactaaaaacaatcaccccaacctgatgtttgatctgcacagtgtagaagccaaaagtgatccggccaatacagaaggtatattatatggtgtatccgaaccgaataatgccagtggtacaggctctgcaaaaacagaaatcatggctaactgtgttcctatgtggaataataacgtagtaaaaactccgagtggaaaaacaggtttcgccgtcactcccgacagcaaagacgttgcagccggtattgtggaggacgtgaataaaacatatggacgaggcattgcccgtgtacgccccaccaactacttccaatataccatttggacagagaaggaaaaaaatgacttacgtggccgatacaaccacgatagttggagacgtatggaagacttgatttataatgacccgaccctgaagaaagccaatgatccctggtatggaaagaaagctgtaaagcctgtaaatatgtcttgtggcgattccatccgttgctggttttcatggccccactacaaagtatatattccagatccaacagcaggtagcggtcaatggaaaggtggttcaagtcctatctatctaatgcgtagtgccgaagtttatctgatgcttgccgaatgttattattggaaagataatctgggtgaagctgccaacatgctgaatgtagtacgcaaacgtgcaggtgccgatctgttgactgctcaggacatcaatatcggtgaaattctgaatgaacgcgcacgtgaactttattacgaagaacatcgtcacattacattagttcgtatcgcttatacatacgcactgacaggtaaaccttgtgagatattcgacggacgtatctacaaaatggaaaacttatgtggtccgaagggtgccagcaacttgaaagatgccggatacaatttctggttcgactggatcagccaacataacaatttctataacaaaggtgtaaagaacagatttgctgaatacactatgagtgttcatcacatgttatggcctattcctaacaaagatatcagagccaacaccaatggacacattaatcaaaataacggttatttaggctgtgaaaataatgtaacccccttgcaggtacccgaagaaggccagttcatgaaagattaatcgtggatatccacttttattaagaattacccctgccacataatatttgtagcaggggtaaattttataatttacaaagaataaagatatgtacaagcttttatataacatttcatttgccgaattgaaaagaaaatggttactattgttaataatcaatttctgtataacacccatagaaatgctggcaaattataagattgaatcttccaattatattttagatttttatcggtttgacttaaccgattgagaaataaactattagcgaattatttgagaaatagaggtaacgatttggcaactgtgcgaatttcagcgttttgcgttgtatgctgtcaaataactctttcatttgcaaatataacatctttttccgaaagtacgaactgttggcagcaattttataaaatcaacttgcgaaaaacgaaaatcattcatcccatttacaagttggcatgttaagaacattgtccgctttgtcattttgttaccgggatttgtccgcatggtaggagaagcgtaccaatcagtcaagtatgttgtttcattatgtaatagccagctgttttttgtgtaatactccgatatcgctttctttttgatttcataagaaagcccccagcgaaaaccctgccggaggctgtttttaatctaatacattttcgggaatatcagttgcttttcttgttagataatattctgtattggtttctatatctgttgctctcattataataggtgctatttcttttgtctttggactttcgatgaaatcgtgccaatcccagcctaaaaaaagttttacaacagcaaacatagtttggtctgttcctgttagattatatttatatatggttctattctccaattctttatgataagttaatgttaagaacggaatatttccctttatggaaaattcataatttcctgtactctttatctttaatttatcatcgtacaagtagaaatctttatcgtcgttatttattaagaaaatttcatcaccttgcttatatggtgggcgtacagggttgttaatagacaaatgtaaataactatctactatctttattcttagatcagttgtttcatgtgcaatattgtcctttacttgaatagttgtttctcctttttgtttaggatatatatctaaattacccataccgatagggcttgataaatctattttgacatctaatatagagggatcttttatctcaacggagtaatctttatttccacttcgtatcattatacttttggctccgattagaggacgctcgtagtaatctttttcaaaagatagatgatgtatatcttctgttttttcatcatcactgcaatttgtaaagcagaagcatagaaatattagaaaaaaagtaaataagtttttgtttctcatgactttagtacttttattttgatttatagttccgtattttcatatttggggtatcaccaacatttactacagatgttgccgtttaatataatattcggcaagctgtttttatggtgtaacgctccgatatcgctttttatatttatttcgtggagatttttctttgttcatttgataccaaactttacgttgccattcatatacagccagtttttcatcatcaacattatttgttttctctatataacttctaatacttggagcataagggtacttggactgtattatatcatctaccaaatagccattcaatcctttcaaattattgaataaaaatccttgaaacattaggtttatatagtctttattcttatgtagatattgtttgtatgctttgtatgcatcagatttcatatagtctgttgctctactactgaaatttggcttttttagttcttcttttaaagccttttcaagtttcttgtattcggtagaatcttgtatgctataccaataatgttcctctggtttgcttattaagtctatccatgctttggcttcccaatagtcaatgttcattcttacagaatctctttgttctggagataattcatagtataaagaatccttttcccaaccgttaaaaacgacttcaagagattctgacttctctctcattatacctttgtagatttctagcagtttttggtctgaaaaggacgttatcatgaatgtaccgctttctattctgcaattaacttgcggagcagtaataatggaatcattaaatacaaatgctattttttccccaatagacttttctgtttcatcggcccatttgtttagcttatgtttgctgatttgtccgcttatagcatattttccgaaataatccttttcaagttttagcccaacgaaatcctttactgttatgattggcttagaggacaaactacctgtacttaatacgtgataccacccattttctttatgcgtaaaatcgtgttttgccgtatttggctgtgctttcattcttggtgaaaagaataaaagtgatataagactgaataagatgatatttgtcttcatattattttgatttatttgaaaaatagcatataacatactatcgctaataaaaacagaagcaatatacttgcaataaaatatatttttgctttgaataaacttgcattatcaagtgcttctttttctattgttcttttatgaatttcttccatttgctcaatagaaatattggataaatcatttcctttacctttgtttacaagatacttttgatgttcttttattctatctctgtttaatttacgaagttcacgattttctttatctcgttgtaacatatcgtttatgcagcctaatgttcccatagcttttaaatttatagttctgtattcacgtatatttttccgaaagttttttgctcgtcacgtatccggcatagctcccgatatacttttaggtgcaaatatagcgaaaagtgccattcataagacatcatgaacggcacttttttattgttttcctgcaagataaacggttatatcttcattcctctgcttttcctttgcggttgtataggtcggcgaatattctgccttagcttgtcgaactgttccttgaaccactcggcaattggctttcggtcaatggcaagaaccagtctcgtcccgtccgtggggtctttcacgacttgaaaccctgccttttcggtcgtgaatttccgtccgtgttcttccgaatagagttcccctgcatactccaacggctttcccttgacgagcgttgcggtctgcctttcatcgaatcccacaaggcggcaaaggttttcgattcggagcatttcacggaaatagggaaaccatgccgccgcctttgcgattaccgttttcagaaacgatatttcctgcttgtgccttgtgtccttgtctgttatctccctgctgtgcttctgctgcatttcccgtatttctcggctgtggtctgcctgcatggtctgtatcctgtcttgcagggcttcgatggtttcctcgtggtcggctatcttcctatgcagggcagtgttctccctctccaacgccttgaccttgttactgccgaaaagagaaccaacgctctcggctatgttggtagctgcggtggttgccgcccctttcagcttctcggtctgtatttcttttttcgcccgtcttagttcctcccgtgccgtttctttctgctgctgcaaatccaccacttccgctttgaggttgtcggagagtttctgtatatcccgataatactgctgcgtggacttgtggcgagccttcgagccgtctatgcccctttgcaacccgtatttcgccatcgcttcggcataggtatcttggtaggacttcaatttcagccgtgtcataatatcgtctgcgcacagcctcacggtgtcggtcggctttttgcggtatcgcttcttcgtctgttcctcccttttcctgcgcttacgctctcccttgacgatggggacgagcgtaacgtgtatgtgcggcgtttcctcgtccctgtgcaggtgagccgccacgatgttctcctttccgaacgtgtcggcgaagtatttcagattgtcggcgcaccactcgtccaaacgcccctcttcctctatccgcttcatgtcctcgtgcgttcccgatacgttgatgcggattgcccgtacttggttgcttccgattttgcgtgtcagcccagcttcttccaatctccgctgtatagccgccgaacggcctttcactccgtcggggtattcgatgagcctgcggttcaggtgcgtgcgtgtggggtcggcgttcttcggtatgatgaaacgctcgatatgtgcggtcgttccgctgtcgctgccgtgcgccttttccatgtgtaaaactacgaaacccatatattcttcctttcttttttggcttgtgaaacaatgatttttttgtatcttcgggggcggcaaatgccgtccccgatggggtgtgcagaggggcttgccccttgccttattggggaattttcagcgatacgtagtattgcggctcggaaaattccctaataagctacggtattttctccgtaaataccctgcggcgtgccgtccgtctgcccgtctgcctttcggcggtggcagtccctgccgcctgcttacccgtataaccccaccttattatttttccctttcggtcggtggtgggcggcggggcggtcgtttccgttttcaaaggctcttttgcacggggcggtcggatacaaggttttcccgataaatcttcctctcgcttcgctgcgagcgtatttatcgggaaacggcgcagccgcctgaccttttagccgacataaagccccgtgcttactttgcctttgtaaacggaaatgattgctccgctttcccctgaaaagaggaattgaacctgcaatatatatcaccatagtgataggtttgcatgtttgcatgctggtatgctggtacgtttgcatgttgatatgttggtatgttgatatgttggtatatcatcatgctttccaacggctgttgggcttgccgtccgaaacaaccgacacgaataccgtcgttttctcttttcgcccgtgtataatcctctctaataatgccctgcggactttcgccgccccgaacgattcgatacggaaagcgagggcggctatcgtttcgaggttgtaaacctccgcgctgtatctgtccgatatgcggataatgcgctttatgtcatatatactcaaaactccgcttttgcagagtgcctttatccctgcccgaaccgtcggggcgataaccccgaacagttcgcagatttctcgctcggtcatggcggttgcgcctatatcgctcggcagggagatattgccctgcccgtccatcgtgataatgttcctttcttctttcatcggtattctgttcttaattaaatggctcggcagatattcttctccatatcctccaacttgtgcgacaaggtttccatgtcttggcttatcttctgggcggtgattttggcgtaaatttgggtggtctttatgttcgtgtgtcccaaaaggcggctcaccgtttcgatgggtacgccgtgcgacagaagcacggtcgtggcgttcgtgtggcgtgcgacatggtaggtcaaacgcaccttgaagccgcattgtctgcctatatctttgagtatcttgttacaactgccgttgctcggaacggggaaaacatgaccgtcccttgccagccccttgtatttctcgatgatacgcttgggaacgtccaaaaggcggatgttcgattcggtgttggtcttctttcttcgggtgattatccacaggttgccgtcgaagaatgtttgcaggcggtcggcggtgaggttcttcacgtccgaatacgccaaacccgtgaaaacagaaaagacgaacaagtcccgtacaagctcgtgggtggcgttcttcatcggtgcgtccatgagcgtctgtatctccgtttgggtgaggtagcccctgtccacgctttcgggagagttgatatatcccgcaaagggattaaagggcaaacgcccgtcgttcctcgctatggaaacgatgtgtttcaacacaatcatgtagccccacacggtattggtgcggcatttcttctccgtgcgcagaaaatactcgaagtcgttgatgaacgtgaggtttagttcctttaatggaatatcctcacgcttgtaggtatggggcaggaactcccgaatatggttgcagaccgtccgataacgggtaaatgtaccctgcgccctgctgtgcccgactttcttctcgaactcggcgttgtgctgctcgaacagcttcagcaaagtttcctgcttgacgccgataccgagataggcgtctttgagtttggcggcggtaacataaccgtccgtctgcattaactcttgatagcggcggtttacctccacacggattttatctactgcaaggttgattctctgcgcttcgacgctcttgcccgaagcacggctgttcttcacgtcccacaagcgtgggggaacgtccatcttgcaactgaactgtttaatctcgccgtccaccgtgatacggcacatcagaggcaggttgccgttcggcttctcgctgcctttcttcacgtaaaataataccttgaatgtacttcgcataactcactcctttttttggttacaaaattagttcttagtgagttaccgacagctatgtaaatcaacgcaaaacgcagaaaaagaaccttttagcaagaaatttgcacccattacgggagtaacgaggtggtaactgaacttctgcgccgtttggcttcgaggtggtatttcgttggctctgtcccatagaaaaacaaagcgtaacgaacgctctatcagctaattcgctacgctttgcccaaatttactttttcgctatgtgtttattttaagaatagcatccaaagataaaggaagattgctgttgcaaaacaaacaatcggagacattggtacaacttggcgagctgaaacttgaccggtggcctcaacttgaactcgaaaacaattgcaagtatgaaataatagaggtggatggggcaagtgccattcgtatcaattattttttttctccatcagtaccgacttcgatgaaacttacaggtacattcatagtacaccaagaccgagtggacgtacagtatttgctttcaggagttcccgaaaagtataaggctgactggaaaggatgtcagttccgtttctgcctgcccgaaaacgccggtactcaaaaacttccggaagccaaattggggatatggcagcgggatactaaaggaggacttccgttagaaacagccgatgccaaaatattcccgtttttgataaaaaaccgcttgctttgccttacttatggagccgataacaaagtcgactcaaattggaaaagcgaggactacagacatacgattctgtcgcgtcaggaagacggcaactatttcactcagttttcaatcctatttcctccttatggatggccttacgaagctatcagtgcaaaatggcagaaacgtccgtttgccttgacacttaccactgataaagtctataactggtgggaggacgcaactgctccaatcggcgtacaagctaaaatcatcaatacgtcaccagttccacaaaaatgtatgcttaagtattggattcgcgactatgccggaaattacatagtgaatgactccaagaaatacttcttagaaacaggagaagtacaagttcactctattgaatttacagcaaacacagaacgggaaatttattttgtagaagtctccgttgaagacgaaaacggaaaagaacaaactttttcaaggacaagtctggctatattgcccccgcatgagtttaaagccacacccgatgaaaatattatggggctttcagcctattgggccattcccgattccatgagcctaaaacgtttattaaaccggatgggtgtccgatgggtacgtaatggaattaccagcagtttcaaaaatacagaagctacatttcacaataacataaactggaagaagaactggaaagacccagagcgagaagaattgatacgctcctttttccgaaagattgtaaagaacggaaataagatatgggaatttggcaatgaactgaacatgagttcaccggatattgccggtgccggcgaaggcattggcaaagctcgtttagccgaagcatatatagagtggctgaaagccatacgcaaagttcaaaaagaacaaattgaatggcggaacattcagattatctcattcggaatagcaggggcagatgaagtcttcctggaaaaaattgtagaattgggaggatgggacttactggacggaatcgcattgcatccgggcagaggtaattttacaccagatttcccggtagccgctccttgggaagatttcaagaagcctacttccggatatcaatactggaattattacggttctatccggatagttaagaatttcatacaaaagcatggaggtaacaaagatttgtaccttaccgaaatatacgcacttgattatccaaatcattcatggaacgatacccctcgcgaagcggcagagaatttattattatcgtatgtgcttgcagcggcagagggagtaaagaatgcgctttactatcagctatttaactccgtatggttcgaccatttaggagtaaatgccaccaaccgggagtatttctttgggatgatcaacagagatttgagtttcaaaccttctttgatggccttttgcaacacggctgaagtattggataaagctgtattcaaaggctggatacggatggacgaaaagcatccgcttagcagaggaattttgttcgacactccgcagggaagcatggttgtactttgggataggacagaaggaaatatcctgacccatcctaacggagatatttttccggaaccttgggtaagctcatggagaataaaaaagaaactgaccttgccaagcagtgctcccgaggttaccttactgaatgccatcggacaaaaacaaatagtacccgctattaacaaccaagtgactatagaactgactggcgctccttgcgtgatatacggaatagacgcgtcacgaattcagctttatcattaatcaaggataccataaagttaaaaaaataagaataatataaacattttaccatgaatactctaaaaatgattacaggaattttattcttcttacagtgttttacgttcacggtgttggctgaaagtcttcccaaatttgctatgattatttccaattgtttcagttgtggaggggccgccctttcccgacacactttcggagagactgttcagactgtcaactggcagtttccccattatttttatcgcaatttccagaaatacaacggcaaagaaaacacgcttccttttgatctgtatgaattgataactcttttagccccacgtccggtttatattgccagcaccaccgaaggccaatgagccgaccctaaaggagaattcctatccggagtacatcctccagtatatgagtttatattcgggcctaccatattcgttccggaaaacataatatcactctatatgactggaaacagtatgtaaagttcgcagataaatgattcaaataaaacatccgcccacggttgtaaaattcaatataactttttaaatattaccagaaatgaataaaatacttattatcagattagtattgttgtatttattggaaatgaagacaatatatgttttttcacagccaccctaaaactgataaaagttactgcctctctcgatcatgcaaactggctatgcaagaccgaagagaaagcaaccgtctctatttgcgtatgaaagaatcaggttcctatgcgaaatatttccatacactatgaaatttcagaagatttgatgaagccccacaaagtagaaaatatggttctgaacgacggcacactaaaattaccattagacacttttaaaaaagataatgctcataatgcaatgtattccatcccgatattcaatttcaacaatatggaacagttgcaggccattgtgaaagcttaatagcctgtttttccttccttttgagtccatgcctcaaaaactttgatctcttcattgtgcaacaatatttccggcggtagtttacggttagcaagctttaaggcaatctcgtcataaataaaagagtcatcaaaacctatattccgcgcggtggtcttgttgtttccgtaatacattctgtccagtttgcccaatagatagcaccgaggcacatggagcatggctagcaagatagataaaagtgttacccaagcaaaaagattgcttcgggtaacacttctatcttaagaataatataaactgttctattgcttgataatcttcttggttatgcgtttggcaccatttatgtcgaagactgcgtaatagattcctacattgattccagtcatgtttatgctgtgtttcaaagtattacctaataccgaaattgactgacttgcaatctgctgcccgattacattataaatatagaggtgtatttgctcgatatccgactgaaaattacctttgatgaacagtcggtcctttaccggattaggacttatttgtatatctttcccatcgacataaaggttctctatgccggtcgaggcatctccgtgaagctgtatctgagaggcatccatgccgtaaacaataaccggagctccggttagagttattgtagctttatggtcttttaccgggattgattctttttgtccgatggcattcaataccgtaatactttcttctttgcaaggcaaagtcaattccgtttgtatattccatgaactgatccagggttccggagaactattcccgttgggacgtggtagtatatcgccttccattctgtcccaaataatactcataggacctttaggcgtatcgaacatgactcctttgctgaaaggattattttcactgaacttaatccatcctttgaaacgggccccatccaacgcttcggatatattacagtaggccatgaaggaaggcttgaaacttagatcgcggttgattagaccaaagaaatattcgcggttgtctgctctcacacctaattgattattccatactgaattgaatagctggtaatagagtgcattctttactccttcagcagcggcaagtgcaaatgaaaggaccacgttctcggctgactcgcggggagtatcattccatgaatggttcggaaagtcaagtgcgtagacttccgtcaggtataaatctttatcatttccatgtgctttgatgaagtttttgagaatacggatggaaccatagtaattccagtattgatatcctgaagaaggtttctcaaattcattccatggaactgttacaggataatcgggagtaaagttacctcttcctgggtgaagtgctattccatccagcaattcccaacctcctagtgtgacgagtttttccaggaatacttcgtcagtaccggcaaaaccgaaagatataattttgattttttgccattccgttttttccgactgtatcttgcggatagcttttaaccatttcacataaggctcggccaatagtgcttttccgataccttcaccggctccacctatatcaggagaactcatattcagttcattgccaaactcccaaattttgtttccattcttcaccatttcttggaagcaggttcggatttgtttatctcgttctgtatcagtccacttttttgtccagtcgatattgttatgatacatcgcttcgatattcttgaaactgctgttaattccgtttcttacccatctgacccccattctgtttaacaaccgtttcaattctgttgagtcagggatagcccagtaagcggaaagtcccatgatgttttcatcaggagtagatgtgaactcgtgtgggggtaggagccctagattcgttctgtggaacacttgctccttgccagtttcatcctcaatggaagcctccacaaagtagatttctctttcgctttcaggggtgaactcaatgggatagacttgtagctgaccggcttctatagtaagtgaccggctttcattgacaacataatttccggcatagtctctgatccaatatttgagtgtgcaatttttcttctcttgggaagtgttggccagatttgcctttacacttaatgttccggatgcattttcccaccaattgtaagatttatcggtgctgagagttaatgcaaagggacgtcctttccattgggcacagatggcttcgtacggccagtccgaagaagccaccagtacggagaacttcgtggagtaggaaccgtccttattatcaattaagacagtatgcctgtaccagtcgtccttccaactagaattagccttattctcaggaccataggccaaacatattattttatcttttatgaggaatgggaagaaattggagtctgcggcttcaatgggcaatcctccttgtgcatcccgttgccataagccgagtttggcctctggcaatatttgggtatttgccttgttggagagtatgaagcggaattgtgagcctccccagttggtgacatatccagtaggaacaccagaaaccaaatattggacgtctacccggtcgggacgtgcaatgaaggttccggtcagtgtaatagaagaaggcacggatgaaggaaaagtgtaggtggctcggatggcctgatatccgtttacttcaatgatttcataactgcatgtattttccattgtgatggcaggtgtccatccgaactttagttttccgagttgaatcaggttttcagattccttgtttttgatgtacaaagtctctgtgtttgtgcctgatgcttgcaggatgtaattgggcatttcaattttgtaaaaagtttgtgcatttaatggtacaatgcacagacttatcaaacataatatccaaatccgttttaatttgtgaaccgattgaaggagtagtgtctttttctgcataaattttagtaatttagtgattatacaattacagccggaaactggctggcaagacaaaactaatgatttgaagcaggttgttcaaagaaacagggataaatcatcggaaacgatttcatgaaaaatgtaaggataaaaaaagaggatacatttctgtctgcgcgttttcaaccagataatgccatatttttttcataagtattatgtatgaattcaacaacattgcaaatatcgaatctttatcaaacaaaataatttacaactaaatcatcgggaacattttctgaaatacagatttgcaaaatatatcaaaaagagagcaattcaataaacaatgcaatcttcttttatgtacttttgtatgcactacttccacatagaagcagacattacaaacttgaatattccataagtatgaaaaaaataattctaatcaacatattacttttgttgtatgggacatttcttccggcacaagaaatcaaacaaaatgtagaagaacgtctacaagctttctttaaagaatataccaccaatacggtaaatatagggacttgcaagctggacagtttccgtattgacttccggaaaaaaaggttgctcatctatacaaacgaacgctttgcctaccagcctttacgaccagcaacagtagatgccatttatcgacatttggagcaaatcttgccgggaccggtgagttatttcaaaattaccctttttgcaaacggacgaagcattgaagacctcattccaaatctttatcggaaagagaagaaagacaagacacgtctgtttaataagttggaatacagagatagtccgtgggtatcccgtatctcacgtccatacgaaattacccgtggattggaaagaagacatatcgccctttggcaaagtcatggaaaatattatattaacaacaaaaataaatggggatggcaacgtccgcgcctgttttgtacaacggaagaccagttcacacaatcattcattttaccctacctcatacccatgctggaaaatgccggagccaacgtattcaccccccgtgaacgggatacgcaaaaacaagaagtaatcgtcgacaatgacggaaacctgagcggatatggtggacaaggttccctctatttagaagtcaaaagccggaaagcacgttggcaacagacaagccaaccagggtttgcccaacagaagagagtatatcaagataacgaaaatcctttcattaccggtacagcccgctatgcccaaaccgaaaagaaaaaagataaagcctttgccgagtggatacccgatattccggaaacaggagattatgctgtatacgtctcttatcaaactttgcctaatagcgtaagtgacgccaaatatattgttttccataatggaggaaccactgagttcaaagttaatcagcagataggtggtggtacgtgggtgtatctcggtactttttcttttgataagggaaagaacgattatggcatggtggtacttagcaatgaaagcaaacagaaaggtgtagtctgcgctgatgccgtacgctttggcggtggaatgggcaatatagaacgcggtggagaaaccagtggaatgcctcgctatctggaaggtgcccgttattctgcacaatgggccggcatgccttatccggtttatggcggacgtgaaggtaaagatgacatgtctgatgacattaatgtacgttccagaatgattaactatctgtccggcggttcgatatttaatcccaaagacaaaggtttaggagtaccttttgaactctcaatggcattgcacagcgatgcgggtgccagcaaagaagataaaatcataggtacgctcggcatatataccaccgatttcaataacggagtactcggagccggaacagaccgctatgcctcccgagacctttccgacattctgcttacccaactccagcgggatatccgttccaattatgccatagattggactcgtcgcagcatgtggaaccgtaattacagtgaaacgcgactgcccgccgttccttccactattgtcgaattactttcgcaccaaaactttgccgatatgcgcctcgggcatgatcccaactttaaattcactgtaggacgctctatttataaagctatcctgcaatacctttgcggtcagcatggcaaggattatgtagtacaacctcttcctgtaagtaacttcgctattcgcttcggtaataaaaagaacacactggaactttcctggaatggtgaagaagacctgttggaaccaacagccaaaccgcgcgaatacatcgtatatacccgcatcggccgtggaggctttgacaatggcgtacgtgtcagcagtccctcttataccgtaaagatagaacccggtattgtctattcctttaaagtaaccgcagccaaccggggtggagaaagttttccatccgagattcttgcagcttataaagcaaaaagagaaaaaggacgtattttgattgtcaatggtttcgaccgcctcagtgggccagccgtcattgatacccccactgaagccggattcgatttaacgaaagacccgggtgtaccttatttatatgacatctcactttgtggtgctcaaacagaattctcccgcaagcagaccgggaaggaactgggacgtagcggtagcgaatgggaaggaatgcgaattgccggaaatagcttcgattatccgttcatacacggaaaggcgatacaggcatccggagattatagtttcgtgtcatgcagtgatgaagccgtagaaagcggacgtattccattggaagcttacgatatcgtagactatatcctcggactggaaaaagaagaccgccaaagcaatccggcaagcaatgcatattacaaaaccttttcctctgccatgcagcgagcactgaccgcttattgccaatccggtggaaatctgcttgtgagcggttcctatcttggcagcgatatgaacggttcgcagggagaccgggagttcacacaaaacattctgaaatatgcctacggacaatccatcaccgataatcgctcaggaaatattaatggtctgggacgtacattcagcatcccccgcctacccaatgagtacgcttatcccgtaacagctcccgaatgtattctaccgacagatactgcttttccagtgctcacctatacttccggaaatcaaagtgctgccattgcctatcagggcaactaccgtaccttcgttatggggttcccattagaaagtattgaacaggaaacggatcgcaacgctgtcatggcttctatcctgcaattctttcaagcaaaaaaataaaaaacaatgcgcctaattaaaaataacgcttatctttgctctcagagtataaacctttaaaaatataaaacactatgtatactatacaagcaaaccccagcggtacccgcagtttagagatatccgaagagaacctggcaaccattgagaaatacggacttttccgtcatcttatcgacagtaatggtattgtagacgaatctgttctggaaaaactgagactgaatatccgctccctcatcgcatcacaagaagaagacagcaaagacttgctcgacctctgcatcgacgtgatataccacaacaacatgaaagccttcggattacagcaactgattaagctctatctggaatggttttcaaagcaggaacccatagaagaggaataataaaatgaaaacaatcgacacgtgcagtcaaaaactttacagtcctctcatcccggccgtcaaagccatgtgcgaagctacactgggtgagaaattggaaattattatgaatgatactgctgccttcaatgatttaaaagaatatctcgcagaacaacaaatcggctttcgtgagatttacgatggcgaacaaatgacggtacaattcaccaaaagataaattgtgcagtaaattgcaaatcatcattcatgatcgtatccggaaataagaaataaaaaaacgaatcctgtttcagcataagaaagcttctaacaggattcgttttatattattttctctcattcaattatacggatccataatcaagggtactacaaaccaaaatgtagaacctttattgacctcagattccaaacctgccctacctcccaaattttggataatagtttgtgaaagtgtcaaccccagacctgttcctggtacttcccgatccaactttttaaaactggaaaatatttcttgctgttcttctttcggaattccaattccagtatcagttacataaaagtaaacctcatccgttccctccatacggcaactaaagcgtatctcacctgatttggtaaacttgatcgcattatgaatcaggtttgccatcacctgaataatacgttggcgttcagaatacatgataatagattgcactgagtcttcacaaatcaaatcaactgaaggattattgaatagtttcaccttaaacataccttccaactctcttaacaagtcattggcatcaaattcagaatactcaaaattcaaagttccggcttctatctgcgaaagatcaaagatatcatttatcaaacgtaacaaacgctcattgttctctgaaataatatccatatacaatttcttttcctcttcatcagaagcggtagctattaatcccgaaaagccgacaatcgcattcaatggtgtgcggacttcatgacttatattcgcaataaaagtggattttaatctctctgcagatatcgagttctttctctcaatattcagcaacctttgaacattctgtagttccgtcacatcataaaccgtcaataccatatgatcttccccgttaataacaacataagcacccgatactgaaacatcacaagggatcactttgtcttctttgtcattcaaaagattcatagaagcatttactttttggaaactctctttcttatgaaaagctcttccaatagccgcgcggataccacaaagtttacactgctgatgcataccacattcgccggcttcggcagcattccggcaatgcaacaggtcaccgaccttttgtgccataccaacctcaggagctggaagcttattcaaggaatagtaattggtatcgcagactataaaatctttatctatcagtaaaaaataagcattgatattctgcaaaatcatagttgtctgatcgagtttgcgttgtatcacatcttttgattcttcatacggaggtatttccataatatatagattgatttatattttgcttgtgccatctgcgtacaaaagtataaaatataaggatataacagacgattctttgatatttttgttagcctctatctcacgagatggatttcatcgtctcacgaagctgttttgccccggacttggggaagagccgcaagcatcatcaacagcaatttaactacgcattttctggctgaacctcattttatgcgtatctttgcggcatgaaagaatatcgactgactgattggttgcccacaacgaaaaaagaagtggagttgcgcggatgggatgaactggacgttatcctgttcagtggtgacgcctatgtagaccacccttctttcggggctgctgttatcggacgtatcctcgaagcagaaggtttgcgcgtggcgattatacctcaacccaattggcgggatgacttacgcgactttaagaagttaggacgtccccgcctgttctttggcatcagtcccggatgtatggactctatggtaaacaaatacactgccaacaagcgtttacgtagtgacgatgcctacacaccggatgcacgtccggatatgcgtccggattacccttcaattgtttacacccaaattctgaagaaattatatcccgacgttcccgtcgtattgggaggtatcgaagcaagcatgcgtcgcgtgacgcattacgattattggcaggataagcttatgaaaagcattctcatagaaagtggtgctgacttgttgatttacggaatgggagaaaaaccggtggtggaactgataagaagattcaatgataagcggctatcactaaataccattccgcaaattgcttacctatgcaagacaacggatttcatcagtgaagaaggagatatccgtctcttttctcatgctgaatgtctgaaagacaagaagaagcaggctgccaatttccgccacattgaagaagagagtaataaatatactgcttcccgtattacacaggaagtagatggtatgactgttgttgtcaatcctccttacccacccctgacggaagctgaactcgatcattcgtacgatttgccctacacccgtctgcctcatcccaaatacaaaggcaagcgaattccggcatacgatatgattaagttttcggtaaatatccatcgtgggtgtttcggtggttgtgcattttgcacgatctcggcacatcaaggaaagtttattgtaagccgcagtaaagaaagcattcttaaagaagtaaaggcactaatggaactccccgattttaaagggtatctgagtgaccttggcggtccatctgccaatatgtaccggatgaaagggagggatgagaacatttgcaagaaatgcaaacgcccctcatgtatccatcccaaagtttgtccgaacctgaataccgaccatcggcctttactggatatttatcatgcggtagatactttacccggtatcaaaaagagtttcatcggtagtggtgtacgctacgacttgctcttgcatcaaagcaaagatccggcaactaataaaagcactgctgaatatacccgcgagttaatagcccgccacgtcagcggtcgtcttaaagtagctccggaacataccagtgaccgggtattgagtatcatgcgcaaaccctcgttcggccaattccaggaattcaagaaaatattcgatcgtatcaaccgcgaagaaggattgcgacaacagctgattccttatttcatttccagtcatcccggctgtaaggaagaggacatggcagaactggctgttatcaccaaacgccttgattttcatctggaacaggtgcaagactttacccctacccctatgaccgtagccactgaagcttggtataccggctaccatccatacacattggagcctgtattcagtgctaaaacaccacgtgaaaagttagcgcaacgccaattctttttctggtataaaccggaagaacgaaagaacatcatcaacgaactacgccgtatcggacggattgatttgatagacaaactatatggaaaacgataaatattaatctaccaatgatgaaacgactctttattctcttcactatctttttgagttatgcaagcacgaccttgcaagcacaagataacctaccgcaaaacttcagtatctcactgggtggcggagtaacattgccgcgtgtagaaggaaaccgtaatgactttttcagtaaaaatggcgaccgtgcgggatacaacctgatgacagaagggcgctactacttcatgcccaactttgccctagggcttcagtatgattacttacgggtagctcgtctgccggataaaatgcacctccattatatacaccccaatattacttaccgctacttgtggagtgagggaaatcaaggagcatttctttcattcggcataggctacatgaactatcaggaacgtacttaccaacgaggtgaacggaacggaatatcttttcagagaggctattgcggactgtcattcggcatgggttacgagttctacattaccaagaaattatcaggagtgtttcgtgcagatatactcacagccgactggtttgcaaaccccgacgcacggctttccaatccatacgattatgatgacggaatagaccacagttggtttaaaaacaatgttacattctttaatttgggatttgcgatacaatttggacgatagctatcagaaaactatccctcttccacctgcatcgccacaatctcctgcaaaacaccaactgccgtttccacattcttcacatccttcactagcatactacgacgagtattctgttcgcgcaaatcgcagcgacgggtatacttcatcatgtatgcaataactttaccgaatgcctgactctgataatagggactttccggattggaaataaagaatagcgacatacgcccacctttaagaaaaaccttttccgcaccaaggcgggcagcaagacgacgcaacggcacaatacgcagtaactcttccgtttctgacggaacaggaccaaaacggtcgataagccggttacggaaagcctctacatctttatccaatgtcagactatccaactcgcggtaaagtaacatacgctcactactacccgtgacgtatgtagcgggaagcaacagttccagatcactttctacctgacattcatcaacaaattgttcgccactaatgacaccaccttcggctttcaactcttcagcatagagatcggcaaactcatcagtcttcaactcgtgaacagcttccgttaatatcttctgataagtttcataaccaagatcggcaatgaaaccactttgttctgcccccaacatattgcctgcaccacgaatatcgaggtcctgcatggcaatatgaattccactacccaaatcgctgaagttctcaatagcctgcaaacgacgtctcgcctcaggagtcaaagaagaaagaggaggtgccagcaaataacagaaagctttcttattgcttcttcccacgcggccgcgcatctggtgaagatcacttaaaccaaagttctgtgcctgattgataataatggtattagcatttggaatatcaataccactttctataatggtagtagctatcaatacatcatagtcataattgacaaagccaaagattatcttttccagttctgtcggttccatctgcccatgtccgatagctattctgcaatccggaatgtgccgctcaatcattgctttcaattcgggcaaattggaaatacggttatttacaaggaacacctgtccgttacgactcatttcaaagttgatggcatcagcaatcacttcctcgttaaaagtatgcacttcagtctgaataggataacggttgggcggaggtgtctgtatcacactcaggtcacgtgcccctatcaatgagaattgcaatgtgcggggaataggtgtagccgtcatagtcaaggtatctacattcactttcagctggcgcagtttctcttttacagataccccgaatttctgctcttcatcaataatcagtaatcccaagtccttgaattgtatatctttacctaaaatacgatgtgtaccgatcagtatattcacatctccggcagccaaaccttttataactgcttttgcctgcgctgccgtgcgagcacggcttaaatattccaccttgcaaggcaaatctttcaaacgatccttgaacgtctgaaaatgctggtaagccagcactgtcgtaggtaccagaacagccacctgcttattatccgccaccgccttaaaagctgcacggactgccacttccgttttaccgaaaccaacgtctccacaaaccaaacggtccatcgggcgattactttccatatccgcttttacatccgccgtagctttactctgatcaggcgtatcttcatagataaacgatgcttccaactcccgctgcaggaaactgtccacactaaactggaatcctttttcctcccgacgctgagaatataacctgataagatcgcgtgcaatatccttaatcttagttttggtgcgctctttcagtttttcccaggcaccggtacctaacttattcaggcggggagcttcaccatccttacctttatacttagatactttatgcaatgaatgaatggaaacaaacaccacgtcttcattctgatagaccagtttcatcacttcttgtgtcgtatctccgttaggaatacgcaccagccctgaaaaacgccctactccatgatcggtatgtacgacataatctcccggagtaaactggttcagctctttcaagcttagagccaccttaccgctacgtgctttatcactcttcagattatatttatgaaaacggtcgaataattgatgatccgtaaagatacaaagccgcaaggcattatcggcaaacccttcatgcaacgtacgttccacggccgtaaatgcaatctgatcccccctgtcttcaaagatggcacggatacggtcagtttgtttcatgctgtcactacagatgtacaacgcatatcccttctccatatattctttgaaactctcagccaccatatcaaagttcttgcggaaaataggctgtgcagacgtatcaaaagtaatcgtagcatccggtgtacctgtcggtttattaccaaattccatacgacggaaatccaatgcacggagtgtaaactcgcttccgtcaatcagcttgccatctaaggttatacagccactttcttctgcttcgcgggcagcaattgcctgtggagtaagtgtttcatcatgcactgtttgaatgcgctcacgcaaccaaagtaaatcacgcattgccagtacggtatccgccgacagaaaatccagaaacgaaaccatgccactcgcaccaccctgctccagactgcggcttaaatcagggacaattacaatgctatctttcttttccttggagagctgtgtctccacctcaaacgtgcggatactttccacttcatccccgaagaagtcaatacggtacggaaactcggaggaaaaagaaaacacatcgataatgctaccacgtacggcatattgtcccggttcatacacataatctacatactcgaagccatagctacgcaatacttccatgatgaagttcgtatccacattctcccccgaatgcagtttcagggttttatcccccaattctttccgggaaacgaccttttcggctaatgcatcaggatatgtcaccacacaaagtccttcttcacctttctgcaagcgactcaacacttctgtacgaagtatttcattcgcagcatctttctgtccgtattttattgccctgcgaaatgaagaagggaaaaacaagactttatctgtccccagcacctgcgtaaggtcatggtagaaatatcccgcctcttccagatcgcccagaataaaaacaaaaggaaattctccacgctgcaccagcacggacgaaaacagtgaagcagcagaagcacatagtccaccacagaaaagagtgcggacagacggattcttcagtaaaccactcatagcttccacattgggatgggcggcatatcgttgttgtagctcggtaatagtcatcataacgggcgcaaaattactaaataatccttagttttattcgtatgtgatagaaaacacttaactttgttcccaatttagaacctccttttatgaatatgcagacatcggacagcatcgttatcattcctacatacaacgaacgggaaaacatcgagaacatcatccgtgccgttttcgccctggaaaaagtattccatatcctgattatagaagatggctcgcctgatggcactgccaacatagtcaagacccttcagcaagagtttcccgaacgtttgttcatgatagaacgcaaaggcaaactgggactgggtactgcctatatcgcaggcttcaaatggtcgctggaacataattatgaatacatctttgaaatggatgccgatttcagccacaaccccgctgacctgccacgcctgtacaaagcctgcgccgaagaaggtgccgatgtctctatcggttcacgctacgtcagtggcgtcaatgtagtgaattggcctatgggacgggtattgatgtcctattttgcctccaagtatgtacgcctcatcaccggactgccgatacatgatacgaccgccggctttaagtgctaccgtcgtgaggtattgcagacaatcgatctggatggtatccgcttcaaaggttatgccttccagattgaaatgaaattcactgcttacaaatgcggtttcaagattgtggaagtaccggttatctttatcaaccgggaactgggtacctcaaaaatgaacagcagtatctttggagaggccgtttttggtgttatcaaactgaaaatgcatagttggttccataaatacccgcaagcagtaaaaaacaattagtgattaatgataaatgattagtgaagatgaaaagaacactgatacataacgcaacaatagtgaacgagggacgctctgtacaaggttccgtagtgattgaaggcgaccgtattgccgaagtgcttacctatgggaaaaagctctctgtcccttgtgatgaaaccatagacgctaccggctgttgcctgttgccgggtgttatcgacgaccatgtacacttccgcgatccgggattaacccacaaagcggatattctcaccgaaagtcgtgcagccgccgcaggtggtgtcacttccatcatggatatgccgaacaccaaccctctgactaccacccttagtgcgctcgaacaaaagtttgatttgctgaatgagaagtgtattgttaaccactcctgctacttcggagccactaataataactatacggaattcaaccagctggacaaacatcgtgtatgtggcatcaaacttttcatgggttccagtaccggaaatatgctggtagacaaaacaaacagtctgctcaatatattcaatggaacagatatgttgattgctactcattgcgaaagccaggaaatcatcaaaaaaaacactgaatactataagaagatgttcagtgatgtaccggaagttcccatcagcaagcaccccaacatacgttcttcagccgcctgctacgcctcaacagaacttgcggtacgcatggcaagcttagcgggtgcacgtctgcatgtgcttcacgtctctacagccaaagaactgcaattgttcagtgatataccgctggaagaaaagcacattacagccgaagcctgtgttgcacatctgttataccgccaacaggattataaagaactgggaacacgtatcaagtgcaatccttccataaagaaacaagctgatcgtgatgctttacggaatgccgtcaataccggcgtgattgatgtgattgctaccgatcatgcgccccacctgctcagtgaaaaggaaggtggcgcactaaaagccatgtcaggtatgccgatgattcaattctctctggtcagcatgctcgaactggcagaaaaaggaattttctctattgaaaccattgtagagaaaatgtgccatgctcctgcccagatatatggtatctgtgatcgcggttatgtccgcgaaggctataaggccgaccttgtacttgtcagccacggagaccgttgggaagtcaactctgagaatattctcagcaagtgcggatggagcccgctggaaggtaattctttccgctggaaagtagaaagaacatttgctaacggacacctgatatacagtgacggacaagtagatgatacttatcgtggcgaagaattgagattcgattacaaagataaatgatgaacagccctgcggataaggtgttgacgtacgctattcatgacgttactccatacatcaactggatatacttctttcatgcgtggggatttcagccccgcttcgccactattgcggatatccatggctgcgatgcctgccgtgcttcctggcttacgactttttctgaagaggatcgtaccaaagccgctgaggcaatgcagctacttaaagaagctaaccgaatgcttaaccagctggatgagacttaccatgtacacaccattttccgtctttgcaaggctaatgccgatggggataatttactgctggacggcacacgctttcctttactccgccaacagatcccccatccggatggcagtccttttctctgcctcagcgattttgtccgccctcttgcttccggtacacctgatacggtaggtatttttgcagcttcctgtgacggagaagttgaactactctatgaggaggatccctacaaacgtatgctggtacagacacttgccgaccggcttgctgaagccgctaccgaaaagatgcatgaatacgtgcgtaaagttgcctgggggtacgcaaaggatgagaatctttccatccccgagttgttaaaggaaaaattccaaggcatacgtcctgccgtcggttacccttctctgcccgatcagtctgtcaactttctgttgaatgaattgcttcatatggagcaaataggcattacgcttacagaaaacggtgctatgcgtccacacgccactgtttgcggattaatgctggcacatcctgccgcacgatattttgcagtaggcaagattggaaatgatcaattggaagattatgcacgacgcagaagaatgccaattaatgaagtaagaaagtttttggcggccaatctctaactttctccctattaaaaagaataacatcagcttatagttgcgttattatatgcttgcggctgcgtcagctcacacttatacaagtgtaagacaacgcagccgcaagtgtaagctgatgcaaccgcaagtgttctatttagaatttatatcctatttcaaactccagattcgtaaatccttcactcctacgccatgaagtccaacctgtacgtccggttagaccgaatgtgaaatggcgtccttctacccccatactataagctgctccaccggtgaagcgtttaccaaaagcttcagattcttctgtttcgtatgtatactgagagccatagccatccgggctggaattataaagttttctcacatcacgaatatccccattaataccgcaatctacataagggccggcagcaattacccagttcatcgaggaacttaaacggaacttataagcaaacagcaaaggaatttccagatacgtcaatttatagttggtagtttcatcactataataccaggtgttgccctccatttcacggtgcgcaatgtaagctgccggctggaaagaccaatgcttggccattttaatgtctacacctcctccgacatgaaaagacactttatctttcgtctcgtcagcacccaaaaagcgactaacacctacacctgccttcacaaaccaggaaaaacgcttatctataaccaaccgccccatcgaaatcttcataggtgtgttaacagtgatgtctttccggcctttctccacctgaatagaatcaaggtacaacggtacatcttcaatgaaaaaattaccatccttatcagaagtagtactcaaagttgtgccttttacggttactttggcattcttcaccggataatgatccttatcaataagtctgcctttcagtttttgtccctgcgccatagatgctcctgatatacagaggcctataattgctaatataattattcgtttcattatatatagtattctttataaattcaacatttaataagtaggatcagaaacggtatgaaacactggcacccagcacaaagttatgttccttcacatctcccggtccttcatcctccgcaataattcccatattcttaccggaaacgtttatcataagcttcttatattccacacctatgccataagtcataccgaacccgagcggatgcagcaatgcatgcttataatttccccagctactctcataatctttactataaatgtcatattcagcatcttccttacccgtttctgaaactttcactttaccgctaagtccccatgaaaataccgggccgaaagaaagtaccaaactcatattacgagccaagtcataacgtaccagaaaattaaacggtacatccagcatcaacggattccaggtctctttataagagtatgatccttccgtgaaattatattctgcgccccgattggccagttgcaccatcggacgaaatgcccaacgcttagacatacgcacttccatacctacaccaaagtgataaccgtttttgctatcagagccctctgccgtataacggctccagtccattccggcttccactaccagcgagagacgcttcgggcgagcagccatcattatcggccgatcaatctttgcatcggtagtctccataccaattgactctacgatcactttcttagcatcaacaggtacgtcccgcaacaggaatttaccgtcgatatcggttatagaactgatgtcggtaccttctgcggtgaccaaagcacctactatcggttcatttctcttgtctgttaccacaccttttatatcgtgcgtctgctgtgccatgagtgttgtcagtccggcaatcgtcatgagcatggttataatcagttttttcatctttgcttatcttgagtattgaatccgttgaacatatccatagatcgtatcattatctttcgttactacaaaaggacgcatataataaaccttctgtagaagaggaccaataaaatgcataccgtcagccgactcagaaacatacgttttatcagcaatggtagggagttgatttacatcggaatagcaaactccaacctctttaattcttccttcaaatccatccactccaaagtaaactgatacttcattctcattagcatatcctaaatctgcataaggaaggtatttcgtaggaatcgtaaaggacttaagatcatccaaagtagcttgcctaccatcttgctgcaaacagtcatgaaggataccgggaccactaccccaactgttactataagcaaccgcacgataataataggtaccggcctgccaatcagaatgatcaaaataccaaatagctgtagtactttgccaaccataataatactcgggatagacactatatacattgtcataatcgaagctatatgacaacaaagccttgtcagtcaaattgtctttatcaggagatataaagtattcaatatgcccgaatgactgataaggagaatccagcactatatcagctgacaacacatacactctattatggtaattaagatgcataccatgagtagattctaaattttccagttcggtatatgaaaaatccaccgcctcttttacttcactcttaacctcagaaggcggaaactccgggctatcaatatcaccacatgccgacaagcccagcagcattgcacagcacactcccataaaatatttcatcatcgttctcttatattgttgttaatagtatccttgcaaagataatgcactcctttagaataatcaaaccctttttttataatatttagccaaaaaagcaatttcaacagccaaatagcctaaaaggaatactaaatgattaaaatctaatcacacccttgtgattttctaattacctttgcgactaacagtgcaaaagcaattcaagaagcaagaaacagacgatggagaatgtagaacaggagttcttgtccgtgatacgggagtatgaacgcgtcatatataaagtgtgctatctgtacacgacgccgaatgctactcttaacgacctgtatcaggacgtcgtgctcaatttgtggagagcctaccccaaattccggagagagtgcaaagtatccacatggatttaccgcatcgcactgaatacttgtattagctttattcgcaaagaaaagaacattcccgaaatcgtgactctaagccaggactccgaccgaatggaagaatcggacgaaacacaagccatgctaaagcagctctaccggatgattaaccgtctgggcccgttggagaagtctattattttgctttatctggaagaaaaaagctacgaggaaattgctgaaatcaccggcctgacggtaacaaacgtcgctaccaaaatcagccggatcaaagacaaacttagaaaaatgaacaaggaggaataatatggaattggatgaactaaagaaatcttggaacgcgctggacgagcaattgaagaaagaaccgattgccgatgaaaagcagattgcgggcatgattgccgaatacaaggcaaacgcacgcaaaagcatagggcgccttacgggttggcaacgcttctccataggtattggagtcgtgggactggctctccttctggttatttggttactgccgtccatctttcagatcaacgaagaatggcaacccaagattaatacactcgtaatatttgtcggcatcagtattctgctggggatctggtgggatcacaaaaactatcgctggataagaaacacgaaaatagatgaaatgcctgtagccatagtaagcaaacgtatggcaagtttccgccgatggacgaaatatgaaattatcgctatttccgtatgggtgattgttttcaatgtactcaattattgggtgatgggctattacaaagcttctttcggcgttcaggccactttgattgcattctttgtgttgtgtgacattgccatcatctatctgctatacaaaaaagtagcttacaaattccttaacgacatcaagaagaatatagaagaattagaagatatatgcacagaataaccctactccttatcctttttttattgatccccgatttgtacatctactttatgtacattgttcggaaaaccaaaaacatctggctgcgcattgcgcactggatccccactcttttattgatagcaggctacttcctgttgatgcagggcataggcgaaaatgcgatggcacaccatgcacaagccatcggaagactggctatctgcattttcctgtttgccatccccaagaccatctttatgatatgctcgttggtggggctaccttttcactatttgctgcgctggccccgttcaccatttacggctgtagggttagtattgggtgtagtcagtttctttaatatactttatggcacccttgtgggtatcagcaaatttgaagtgaaggatatcgaatttcaccaccccaatcttccgaaagcatttgacggttaccgtatcgtgcaactatcggatatacatatcggcagctggatagacaatgagaaaaccatcaatgaactggtagaactcgtaaacgcccagaaacccgatctgatagtatttaccggtgacctggtgaaccaaagaagttgcgaactggaaggatttcaggacattctggtgcaattgcatgccaaagatggagtatattccattctgggtaaccatgactacggaagttactatcattggaaaaacctgaaagaacaggttaataacattgacaatctgattcggatgcaaaagacaatgggatggaaactactgaacaatgagtatgatatattacatcatgagggggacagcatcgcacttatcggtgtagagaatgatggtgaacctcctttctcacaatttgccgacctgaaaaaagcgactaaaggtacagatggaatgttccgcattctgttaagccataatcctacgcactggcgccgggaagtactgccggatacagacatcgagctgatgcttgccggacatactcatgcgatgcaggctatcatgttcggtcattcacttgcttcgctgatttatcccgaatggggagggatgtacactgaaggagatcggggattatatgttaatataggaatcggttatgtaggactaccgttccgcttcggggcatggccggaaattacagtgataacgttgcgtgattaggcgcaacgttatccggctcaaaactaatcggacaaatagattcagtctgcttgcagtcgcactatatccagtaccaattcctctgttttctcattctcatccagcgaattatcaacaaaaagggcaactccgtcattggtttccatccatcctgtgaaatagttatatcgatgagacggtaacttagcctctcccacaaccacaaagtctttatcaaaaaacgtcagataaagatcacgatcatccatcaaattcagtatatctctcgtagcatcaaattctattcctccaagatgtaaacgggcatacattcccgtttgcggaagatacataagatcatagaaatgaggattctcaatattatgccgttcccattgctcgtagttacccgattcgcatttttccactacatttttcgtgaaacgactatctgcttcaaaaactttttgctctccactcttacgatccataacatatacatgagactcgaccggatagttataaaggagcttttccgctgtaaaggttatattcaaatcactcatattaccataatctctgccactcacattcgtaacagccaccgatggctgcaatagatagtcgacagacggagtcatactgttcagaaaagtttcccgaactttaaaggtaaccggcgatgtagagaaatcctttattccataaagcaatgaatgacgtcctccgtcataaaacagccgcgctgtagatattgcatgattagtgtttatcagaatttgttcattgtctttcagttccggacgtaaatctactgttttcaaaagtttcccatcaccatttatcaggagtatccgttgcgtatcatcataaatccagatagagtccggagtttgtataaaaagcccggctacagaacgcattacagctgattccgcctgacttgaaagcaatatttgcgatatctgatgacgcttcaaatccatacaatccaaagcatgagatttataattgtatccataaatcaaactcagagagtcattatgaaaataagaagacaaataataagacttcaaattcaaaacctccgaaacggggaacagaatatcttccgtctgcaacttcacttcattaacctcttgtcccgcagattgtttcttgctcccattacaagaaataaagaagaaacaaagtggaaatatgattaatgcccaatgctttatacgattactaataaccaagattgctctcgatacagaaaacttcgttgtttcatttttcatatacattatatattagatgttttgcctgggcaaatataagaactatgtatacactaaattgtaattttcatataattttccaagttttattcaaaagacctttctccatatcataccgctttgttccatttctcttctcccatccaccctattcgcatctccttcgctcctatagagagaacaaaatagcgaacttggtacgaagagggtacgaagaagatacaaggaaggtacgaaggaagaattattgttctttttttcgttttccgatattccgaagaaacggagaatatttcaccgacatctccctattacccctccagaaacctcttgtgggggatataaaaaatggctacaccctttgcctcggatggctacaccctttagtgcaaatggctacaccatccgggacaaagggtgtagccctggcaaaagccgaattaccgaataatctaaaagtacgataaccgggtagcatatctaaatcaaattatatatctttgcggaaacaaaaatccaacacctatgaagatactttattatatttaccaaatatgttttgctttaccaattctgttggtattgactattctcacggctttggtgactatcgtcggctctctgataggcggtgcacatatctggggctattatcccggaaaaatatggtcacaattgatttgtgttttcctactgattcctgtaaaggtgcgcggccgggagaaaatacataaacatacatcgtacgtattcgtacccaaccaccagggagcattcgatatcttcctcatttacggatttctggggcgtaacttcaagtggatgatgaagaagagcctgcggaaattacctttcgtagggaaagcctgcgaaagtgcaggacacatatttgtagatcgttctggtcccaagaaagtattggaaaccattcgccaggcaaaggcttcgctaaaagacggcgtatcattggttgtgttcccggaaggtgcccgtacttttaccggacacatgggatattttaaaaaaggtgcattccagttggcagatgaattgcagctggaagtggtgccggtcactatcgacggatcattcaaaattctgccccgcacgggaaaatggatacatccgtaccgcatgatactgaccattcacgatccgatcccgcccaaaggacaaggtatagaaaacatcaaggcgacgatggccgaagcctacgccgccgtagaaagtgctttaccggaagaatacaagggaatggtgaaaaacgaggaccaataataaaattaaaaattgaaaattagaaattaaaacgttgcaatccaaaagatgagtttgtgaaacagcatgataacatgcctttaatttttaatttctaattattaatttttccgctctcctccatacgccgatgttcctctatcaatttcatattctctttagctttatcgaggaattccctcaccaaaggactactcttgaaagtttgaggggctgtacggatgatatcctctatttgcggtgtcatgatgggataaggcagtgtactgcacatcatcatgaatacgctgggaccaaggacattctcataattggtggaaatgaactccttgatatagtcattcatttcttttaccaaggcttctccctcctgagtcagttgttcgtggatgtcatccaatgcggcgccatccagcaccatacgtgcctctttcttttccagttcttcaatcttcaactcaagcgaattacgcttttcgatgaattcatacaaagcattgtttagcggcgtacctttagcggtgagttgagagttggatatggagacttcaatcttaccgttctcaagtacaagaggcatgatagcctcatcattcatgtagagcgtcaccatcattacagagtccgacggaccactcgtagagaacaaaccgtgtaccacttcggcggaatcaattgctatccactgcccgtcgcggagcgttttcaggtataacatcttaccatcgaggctggtcaccgatgacacaccctccactttatacttgcgactgcacgaagcaaaaagcacgagcaaaagcattaagggcaaaatacggttcacattcattctaatcatgcaggaaacgatttttatgaaacacgatacaaaggtacaacctattcgggctgtaaagaaactttttatcaatatttaatttttgctctcttttttccattaataatccttataaggagggagaaaagaaaggatatttcatttagtttacttatttttgcagtgataactaacaaaatgtaaaccctgtaactgaaacaagttaatctcctatgtcaacttatgctccttttgccaagcctctttatgttatgctgaaaccggtaggcgccgtatgcaaccttgcatgcgattactgttactacctggaaaagagcaagctataccaaaacaaccccaagcacgtaatgagtgaggagttgctggaaaagtttattgaagaatacataaattcgcaaaccatgccgcaggtaatgttcacctggcacggtggggaaactttgatgcgcccgttgtccttctacaaaaaggccatggaactgcaaaaaaaatatgcccgcggacgcaccatagacaatagcatacagaccaacggaaccatgctgacggatgaatggtgcgaattcttccgtgaaaacaactggctggtaggtgtctctatcgacgggccacaagaatttcacgacgaatatcgcaagaataagcaaggtaagccttctttcgtaaaagtaatgcaaggcatcaatctgctgaaaaagcatggtgtggaatggaacggcatggcggtagtgaacgactacaatgccgattatcctctggaattctacaacttcttcaaagaaataggttgtcactacatacagttcgcccccatcgtagagcgcgtattcggacatcaggacggacgtcatctggcctcactggccgatcgtgaagaggtggccgaactggcggatttctccatcagccctgagcaatggggcaatttcctctgcaccctctttgacgaatgggtgaaaaaggatgtaggtacctattacattcaattgttcgactctaccctagccaactggataggcgaacaaccgggcgtttgctccatggcaaagacttgcggacatgcgggagtgatggagttcaacggagacgtatactcctgcgaccattttgtattccccgaatataagttgggcaacatttaccagaagacgctggtggaaatgatgtacagtgataagcagcaggctttcggacaaatgaagcagcaatcattgcccacccaatgccgggagtgtgaatggctgtttgcctgcaatggcgaatgtcctaaaaaccgcttcgcacgaacggcaagtggcgaaccgggactgaattatctgtgcaagggatatcatcgttttttcagtcatgtagcgccatacatggacttcatgaagaatgaactgatgaaccaacgtccgcctgccaatgtaatgaatttcataaaacaataaattgtataaacagataacaatgaaaattagaacctacttagtagcgcttgcagcgctggcgttcggctctacagcacgtgccgacgaaggaatgtggttactgcaactgatgaaacagcagaactccattgagttgatgaaaaaacaaggtttgaaactggaagcggatgatttgtataatccgaatggagtgtcactgaaagatgcggtaggtatctttggcggtggttgtacaggtgaaatcatctcaccggaagggctgattctgacaaaccatcattgcggatacgcttctatccagcaacatagcagcgtggaacatgactatctgaccgatggtttctgggcaaaaaaccgtggtgaggaattgcctactccgggattgaaattccagttcgttgaccgtatcgaagacattacggacatcgtgaaccaaaagatcgctgccggtgaagtaactgaagtaaatgcactcacccgcccgttcctcaataaactggctaaagaattgtttgagaagagcgatctgaaaggtaaaaaaggcattgaagtacaagctttgccgttctatgccggaaataaattctatttgttctataagaaagtgtacacagacgtacgtatggtagccgcacctccttcttccgtaggcaaatttggtggcgagacggacaactggatgtggccccgccacacgggtgacttctccatgttccgtatctatgccgatgctaacggtgatcccgcagaatatgcagcatcaaatgtacctttgaagactcccaaatatctgcctatctctatcaaggggctggaagaaggtgattacgccatgatcatgggtttccccggaagcacaagccgttacctcaccgtatcggaagtaaaggaacgtatggaagcacagaaccaaccgcgtatcactatacgtggcgcacgcctcgccgtattgaaagaagtgatggctgccagcgacaaaactcgtattcaatatgccaacaagtatgccggcagcagcaattactggaagaactccatcggtatgaataaagcgatcattgataatgatgtactgggtacaaaggcagaacaggagaagaaattcgcagaattcgctaaaggtaaaccggagtacgaaggtgtagtagaaaaaatagatgccattgtaaaccagacaatgccggtgaccggtcagtattactacctgatggaagcattcagtggcgccattgaattcggtagcccgtacatggttatggataacctgaaaaagggattggaagaaaagaacgactctctcatcaataagtctctcgaacagttgaaagaggtctttgctgacatccataataaagactacgatcatgaagtagaccgcaaagtagccaaagctatcttcccggtatatgccgaaattattccggcagaacaacgcccggctttctatcaggctattgaaaaagagtttaaaggcgactataatgcttatattgatgccatgtatgacaattccatcctggcaaaccaggccaactttgacaagttcatcaagaaacctacagtaaaagctatcgaaaaggatctggcaactcaatattcacgcgccaagattgaaaaactgaggtcactggcacaagaactgaacagtacttccaaagaactggcattactgcacaaagcatatatccgcggactgggcgaaatgaaagaacccgttccttcttatccggacgctaactttaccattcgactgacgtatggtaacgtgaaatcatacaatccgcgtgatgccgtacattacaagtactatactactacggacggtattctggaaaaggaaaatcccgaggaccgtgaattcgtagttcctgccaaactgaaggagctgatactgaaaaaagacttcggacgttatgctctgccaaacggtgatatgccggtttgcttcctcagcacaaacgacatcaccggtggtaactccggtagccccgtgctgaatgcaaacggtgaattaatcggtactgctttcgatggtaactgggagtctcttagcggtgacatcaattttgataataacctgcaacgttgtatcaatctggacatccgctatgtactgttcatccttgaaaaactgggaggatgcgaacatttgattaaagaaatgaaaattgtagaatgagaaaaacaatcttatccctattcataacatcacttgccttcgccgcacacgctgacgaaggcatgtggatgctgaccgatctgcaaaagcagaacgaagtcgctatgacggaactgggattactaatcccggtgaaccagatttataatcctgacggcatcgccctgaaagatgcagtggttcacttcggtggcggttgcacaggtgaagtgatctctgccgaaggattggtactgactaaccatcattgtggctatggttctatccaacagcacagtacagtggagcatgactatctgacagatggattctgggcaatgaaccgcgaagaagagcttccctgtaaaggacttaccattacttacattgatgaaatcctggatgtaacagactacgtcaacgaacagttgaagatagatccggacccaaacggtacaaactatctgtcacccaaatacctgaaagaagtagccgagcgcttctcttccgaacaaggcattgccctgacaccgggacgcaagcttgaactgaaagctttctatggtggtaaccgctactacctgtttgttaaaaccacttacagtgacatccgtatggtgggtacacctccctcttctatcggtaaattcggtgcggataccgataactggatgtggccgcgacatacaggtgacttctctttgttccgcatatatgccgacaaggacggaaatccggtggaatactccaaggataacgttcccctgaaagtgaagaaacatcttaccatcagccttgccggatacaaagaaggtgacttcactttcgtcatgggatttcccggacgcaactggcgctatatgatttccgacgaagtggaagaacgcatgcaaaccactaatttcatgcgccatcatgtacgtggtgttcgccaggaagcattgatggaacaaatgcagaaagatcctgctgtacgtatccattatgccagtaagtatgcctcttctgccaattattggaaaaatgccattggtatgaacgaagggcttatccgcctgaaagtactcgacacgaaacgtgcccagcaggaacaactcttggctcgcggacgtgaacagggtgatgattcttatcagaaagcattcgatcaaatacgcagtatcgttgagcatcgccgccctgccctctatcatcagcaagccattcaggaagcattggtgacaggcctggactttatgcgcatccccaacacttctgccatgctggctgccctgaaaagcaaggataaggcacagataaaggctgccgctgatagcttaaagattgccgctgacaaatactttgcttccgtacctttccctgatgtggaacgtacagttgccaagaaaatgttgcagacttatatgcaatatatcccggcggaacaacgcatcagcatctttgaggtcattgacaaacgtttcaaaggtaacagtgatgcctttgtcgatgcttgtttcgaccactctatcttcggcaagaaggaaaactttgaaaagttcatccgaaaaccgggctcgtataagttgggatttgactggatggtactgttcaaacattccatcacagacggactgttgcagaccgccattgctatggcagacgccaacaagaattacaatgccgcacacaaagtatgggtaaaaggtatgatggacatgaaacggaatgcaggtactcccatttatccggatgccaactccaccctgcgcctcacctacggaaaggtgttgccttataaaccggctgacggagtggaatatggttactataccaccctcaaaggtgccatggaaaaggaagatcccgacaattgggagtttgtgattcccgccaaattaaaacaactgtatcagtccaaggacttcggacgctatgccatgccgaatggtgaaatgcctatctgcttcattgtgaatacagacaacacaggcggtaactccggcagtccggtattcaacgccaaaggtgagctcatcggtacaggtttcgaccgcaattatgaaggacttacaggagatatagccttccgcccctcttcacagcgtgcagcctgcgtagacattcgttacactttatttatcatagagaagtatgccggtgcctcacatattatcaaggagctgactattgcggaataaataaaaagaagtataaaaatatcactcggatattcaagtgaaccataattcgcccctgcaagtaaagtgaataactaaagtcaatcacaatgtttgcaggggcgaaatgttttcattcaaccatagtacaacagttacccacagagcacccaggaaagaaatcagaatcatttgataagttttccgatggaaaatgtttcaaaattgaaagtattctaaaaaatacccaaatatgccatttaaatagtatgaaaagcaatagatcgtgaacaaaagacaccacaaactgtttcactatacagacaacaacactaatattgtatttatacaaaaaaatgaattaataacagaaaggaaaagattatggagaaatttgaagaacttatacaatcagaaaaacctgttttagtagacttttttgcaacttggtgtggcccatgtaaggcaatgcatcccgtattggaagagctgaaaggacaaatcggtgatggtgcccgcatcgtgaaaatcgatgtagaccaacatgaggaactggctgctaagtatcgtatacaagcggtacccacttttatcgtattcaagaaaggtgaagccgtttggcgtcattccggagttattaagggcagtgagctgaaaggcgtcattgaacaaaattcataaagaacaaacattatgaagaaagtactaacctttgccattctgatttttgccagcgtactgacattcgcctgcaaggatggagcaaaagcacaacccaatgaaccggaacaaaaagaagccaagagcggagaagtaatcgtaatgaacaaggatatgtttattaaagatgtattcgattacgagaaatcccaggactggaaatataagggtgacaaacccgccattattgacttgtatgccgactggtgtggtccctgccgcatgacagcgcccatcatgaaagatctggcaaaagaatacgccggaaagatcgtgatctacaaagtgaatgtggacaaagaacgtgaacttgccgcattattcaatgcaagcagcattcctctctttgtattcattccgatggaaggagaacctcagcttttccgtggtgcagctgataaagccacttaccaaaaggcaattgaagatttcttgttaaagaagaaataatatataagaaaaagtcactggagttatgtatgaatgaggagtggcatatctttccactcattattgtacatctccgtgacagtgtgataaccggacgcttgcagggccatcaaagcttgcaggcgtccgttgtttatacgctccgggtagtgggaatcactattaacctgtacacggattcccttttcaagcaatacagggaagtagcgttcattaggatagaaagtgcccaattccagataagattttgtattaatctctacgatatatccttttcgggcaatagcatcaaaatatccctgaatcaaagcatcataccaaggttcatccagtaagccgggatgataagcagatgcgttatagtgcattttgtcagcatgaccgacaatatcaaaaccgcccagttccaccatacgcatcaaacggtcataataaagatgcaccactctcaccagatcaccattgaaatgtttatccacaactctgcagaatttatcagccgtcacatccacatccactatttctcccttatcatcataaagcaagtgcacagaaccgatacggtaatccaacggtaattcgcggaaacggacaacagacggattgctctcttcattcagatagtcaatctccagaccgatatagagttctatttgtccggtatacttagccttcagacgatggaattcggccagatagtcatccatagcgtcccactccatagtccacgctgtagaaaacggcagaggggcatgggaagaaaatccataagaagtaaatccttcactcagggcaaagcggataaagtcttccatattagcacgtccgtcgcaatataagctatgactatgatagttcgttaaatttccagttctgttgctcataattttatcatcttatcatttatcatcttatcaaccatcttatcaccctatcattcttctatttcactaagttccagccaacgcatggtcttttcatcaatcaaatccgtgatctcgggcaaacgctttgatttctccgtgagttcttctacggataaggtgccactgcacagggcagcttcaatggttttcttttcgtcctccaatgtagctatttcctgctccagctgttcaaactcccttttctctttaaaggacatccggcgtttttcattcaaacgcactttagcggttttatcttcctgcggtttagaggcttctttttctttctccttttccagtcgggctttttcttccttccagtcacggtactgggtataatttccggggaaatcacggatatctgcctgaccgttgaagactaacatgtggtctactactttatccataaaatagcggtcgtggcttactacgataacacaacccttgaaattctgtaaatactcttccagcacattcagggtaatgatatccagatcattggtaggctcatccagcacaaggaaattaggattacgcatcaataccgtacacagatacaggcgacggcgttctccaccactcagtttataaacatagctatgctgggtttcgggagtgaagagaaaatgttgcagaaactgggaagcggtcagctttttaccattacctaactctatgacttcggcgatatcctgtaccacatcaatcactttcatctgctcatcgaactgtaagccatcctgcgaataataaccgaaacgtaccgtttctccgatatcaatcgttccgctatcggctttctcctctcccatcagtattttgataaaagtagatttaccggtaccgttattacctacaatgcccatcttttcataacgggcaaaaatgtaagaaaagtcttctaatattttaaggtcaccaaacgacttgtacagatggtctgcttcgaatatcttgctaccgatgtaggaggcctttacttccagtttcacattgtcgttattaaaccgctgtttagctactttctccagttcatagaaagcttcttcgcgataacgcgctttatgcccgcgggcttgcggcatacgacgcatccattccaactcagtgcgatacagattgttggcacgggttatttcaacattcgttgcatcgatacgctcttgacgtttctccaggtaatagctataatttcccttatattgatagatctgacgattgtctatttcaatgatttcggtacagacacggtcgaggaagtaacggtcgtgcgtcaccatgagcagactcaggtttgtgcggcgcagataatcttccaaccattcagtcatatcaagatcgagatggttggtcggctcatccagaatcagcaggtcaggctcagtgataagggtattggcaagcgccacgcgcttcaactgtccaccggaaagatgctttacttgctgatcgaagtttcttatcttcaactgggaaagaatttgcttggccttctgctcatactcccatgctttttcatgatccatgcgcaccaggatttcgtccaaaccaggatgtccttctgtttccatgcagcgttcgtactcctttatcagttctaccgtactgttgccatgatggaaacaagcttccagaacggtcagtccttcgggatattgcgggtcttgttccaaatatcctaccctaaggtcacgacgaaaagaaatggttccactgtcatagccttcttttccggcaatgatattcaacaaagtagttttaccactgccgtttttggcaatcagtccgatacgttgcccttcggccacaccgagcgaagtattctcaagcaataccaaatcaccgaatgacttggtcaaattttctatctgaagataactaatcacagtttaagatttataatttataatttatgatttatggctggttggcaaatgatcagagtaaggatttgtaggtttctgccagattgcaaggttcccctgccttcactttgctccacactaatttcatggggtcaatccattctccggtagtaagattctgcaatacaggagcttcacgattaccatctatcagagtcatccattctaacccatctacttcattggcaagaatcacacagatggcaataccaaatgaaagccatgcttctttcttcttcggaccgatagtcccactatcaatgatctgctgcatgctgtccaaatcttcttccataccctggaaatcttttttcagttgttcttttacagtagtggtcacccactcaaaagcttcattaatctggtagatttcggacaggcgaaccggtataagctctgccggatatttcactccctctttacgtatttccaacgaggcgataacggcttcggcctctgccacagatgctcccttgcttaccgtaaaggaacattcaaaggcaacatcatccacaccggtaatccaaagatgagaagtataataagctccttcttcttcaaacatctccttactgtaagcacatgccaagcttcctattttaacggagactgccgaaggattgtctttcaattcctgacgggtaacttcccgaccatacatagcgttacctttatatgcagaaatacgaaaattcccagtccattcacttggattatagaagagaaaagagccttccccatcttcaaactcattccagtccgcgggatacaacatggaaaaccatgctcccggagagataaatttcttgctttgtgccattgctattcagagattaataacgaggccacctgacctcgttcggcaaaagtaacattacatccgttgatatgcaaacaaacagaaacaaaaaacagccgattctcacgaaccgactgtcccaatcatcatctatgaatgaagaccgttacagtcttcaatatcttattaaatctctatgaaacttcaaagaaaatcatatttctgtttccgagcgcaaagataatcaatgaaatatatagattcccaatattttaagatatttaaattaacgttctataaactatggaattttatagattaatatgcaaaaaaggagccgattctcacgaaccgactgccccaatcatcatttatgaatgaagacttaaaagtcttcgcttgttttatttcaaattaaacatattattttcaatcggctgaatcccaccatacaggatatgtccagatgtcatcatcattatagttgggttgaatggccctaagctgatctgcattataattgatttcatgagaacattgctttatacgacgccattgtttaccttgtggaatacccttcagtgaagctgcatttacagaatattcataaggcatttgccatcccatataatttttataatcatgacgacgcatatcattccaattcacagttgagtaaagcatcgcaataaacttctgactcataatcttttccaatgttatgtctgatgcagtgccaatggcaccatttaggaactcgtctatttttacctgttccatttgtcccattgaaggacagtcagtataggctgcatcgccggtccaaatcgtcaacatcttgtttagttcatcgatattagccttgatgccgtccttataggcattaaaagcttctgtttttttactttgcttaaagagtacctcagccttgataaagcaggcttcagcataagtagcccacagataaggactattaggacggacataaacgttacccgatgaaggataccaattatcaatagcccgatagaaaatattaggtgtactgtaaacgcctacagaacccgcataaatacctacataaatggagtctgatgcacgagtgtctatggatggattccaaccgccctctttacggctgataaaattagccataccattgggtatacgaacgtccgattgcatatcaactcctgcaccacgtttccaaattttagttccattctcactgaattgacgccaagcaataatcttatctgcacgcggatcttcgatgcccttattatcaaaatcagtcaatagatctacaagccattttgttggtaatgtgatatggcggttaccattgtaagtttgattccagttataattggtctgcataggatcagtggaaataaaatcttttgaagactctctaatatcctgacattcaatatatgtatcatcatcaatgctttgttgcgccttgtttaaacaatcaagaatagtttcaggatcatagtatgcagatttcttcgacatttgattgatagtacgagcctttaacaggtaggccatcttaacccacttatcaatattaccaccattccagctatcaccttcggacaatgccggttgtcctaccgcctgagtttttccaaattgttcaatagcttcatcaatgtcttttaaagactcagtatagatggtttcacctgtatcatatttgggatgagggctaatactattagcctcaaaataaggcatttcaccatacatatcagccattaaaaggaagccataagccttaagcaatttagcagcacctgcatagtgccatgcttctgaagcaatagccttgtcatacatatctaccagattgggacccgcaccaacaaagaattgttgataggaggtagtactcaatgaactagtagcctcccattgtgcagaacaaccatcacgatgtgtacgagaagtagcagtaaacgcctggcaaataaattgcgagcgatatccatgtgcaccggttgcataagccaagtgatattgaatccacggaagcaaagtctttacagaaacggcagcttgggcgggagtattgggatcctcattgacgtccagccaatctgtacaagaggcaaatgtcattaaccctgctacacttaatataattgatttaaatagtttcatatttctaaattttagcagttgaaaaattagaatgttacattaaagccaaacgcaaaacttgcagttggcggtacacagcagtaatcaatacccgttgcaccggaaccggaaataccggaacctgcagaagaagattcgggatcaccacgatagttagtaaacaaaagcaaattattggctgtcgcggatacattggcacgctttatgcctattttggccaaaaatgccttaggaagttcatagttcaaagaaatagtacgaagacggagcgagttgactttagtgatataattaagaccttcacgatagtagtaatctgtataatatttttggattacttcttttcctgaaacctgagctccattgaggttataagtttcattagcattgaatgtataagttacatctttataggtatcaccatcttgctgggcacccgcaatagtcaatgattcacggtcagctgttaaatcactaagccccttaccaaccaaatagtaatcagtaccgttatatatatcaccacctatccggaactcccacaacatattgaatgtccaattcttatagctgatagtattattaaaaccaccttggattttaggttcacgattacctataagcacgcgggtatccttatcatacgtaggcattccatattggtcaagaattaccttgccatcatcagtatatttatagtgatatccggaaatacccaagaatggaccattattgaatgacgcagcctgagcatcaccaaattgcacatccgtaacatacagcacatctgtgcctactggcaattttttaacagtaccacgattcccgtaaagattcaagcttgcatcccaagtccagtctttagtttgtatcggagtaccactgattgtaagttccatacctttgttatagacatcaccgatattctgggcaaagaatatgaaacccgtggattgcggaccacgcggagaaataatctgatcaagtgagttattagtataataagcatagtctaggcgcaaacgattctttaagaaacgtaactcaagacctatttctgttgattccgtcatctcgggtttcaataccggattaccacggctccagctcgttccatatccggttattcccccaagcattgttgctgcattttccaaataagtagttgtagcataaggactggcatctttacctactttggcccaacttacacgaagtttaccaaagctaagaaagctatcatccatcaatcccctgtcttgcaagaactgagtaaataccaaacttccgctgacagatggatagaaatacgaacggttttccacaggcagcgtagaagaccagtcattacgacctgtagctgttaaaaatattgtatttttccagtcaacacggaattcgccaaacacaccgacaagacggtgcttgctacgatttacaacaagatacttatcagctgttgaaatattaccaaatgaatagaaccccggaataacaaaattccaaccataacgatagttagtcgtcgacttcgtggcatctgttgcagtgccaagcatcaagttaaaattaaaatcaccaaacgacttgctgaagttagtcatcaagttagtagacaaatattggtaacgaagagagttttcactcatcattccattttgccacagatctttcacagctgcgccttcagcaatacgattactattttctgtcgtatatgaatcaacacccatacgataagaaatccaccaccaatctgtaatatcagctttcacactgaaactacccgtaaaacgttctgtatcatccttcagtctgtaattatcaagcatccaataaggattttcaacatcagcggatagctcttggcgaccttcgaatatacgatattttgaaccatcttcatttaaataatgcttcatatcatcactgcgtgcccatccataaagagcaaccatggaacccgtccctgatgaatcatgaagacctgcagaagttaaagttttgcttgtacgagcctgagaataggctacattagcattaaatgttagcattttccatctttgctcggcattgaagcggaaagtcgtctttgtataaccggtagtcggaattatgccatcttggtcatagaatgaaccggacaagaaaaagttaccagtcttattaccacctgatacactcacattagtgtcccatgcacctccgttttgaaagaaatctccaacattgtcataagctgtttctccagctgcataaggttctccccaagaatttgtagtaaaatcatctactatagccttaccactcgaatcaaggccgttgtaaaatcctctcttatacatggattgagttttcgggagcgatttgacccatgaagtaagatactttgcactcaaatttacttccacattaccttctttacctttctttgtcgtaataagaataacaccggctgcagcacgagaaccgtatagagccgatgctgcaggtcctttaagaattgacatattctcaatatcttccggattaatatccataacacgattagagcctgttgtagctgaagctttcatcccatcatatgcagagttaccgattattgaagttgagttatcatagataacgccatcaacaacgaataatggctgattgtcgcgttcgagtgatgttccaccacgaaggataatctgagaacctgcaccagccgcacctgacgtctgcgtaatcgtcacacccgccaccttaccagccaaagaattgatcgcattggtactcttgttcttcatcaattctttcgcatttacatcatccacagcataccccaaagatttgcgttcttttttgatacccatcgctgttactacaacttcctccagcgcctgagtatcatctgccaaagtcacattatagatacttcccgcacctacttttatttcagccgaagtataccccacaaatgaaattaccaatgtgctaccttgctgggcatccacagagaaattaccatccacatttgtcacagtacccgtacctgtgcctttcactaacacactggcgccaataattggttcgcctgtcgcatccataactttacctgtgattttctttgcctgcagagtactttgggtacttggtataaggggagtatattcttttttttgcttcaattaataatccgatattaatattgagtttaattaatagcaataaaggagagaatcctgaagtgtgtctctttattttctactattatatataaaatagtatatatatataataatttaccttgtgtaggtattaatgcaatttacatcgcatcaacactaatatttgcttatatatgacactatggtggaaatttatttcttaaaatatcaatatgattattttataaaactattataatcaaatatcttttatacaggtttacgagttatatgttaataaaatattctataacctactaaatcataaaaacaaatatattagtaatcgtttgcatatttttagcactatctgtactatgaatactaaatatattcatatatttgcaaacaaatccaaattagagagcttatgaaaaacgattattgcttatcattagtattgcttgcattatttgggatgtcttctccatattcagctaaggcttttactggagataatataccaagtacccaaagaactaaatgacatcattgctaaccatttcctattttccaataggctgtatcttccttctcacatccttagaaatctccaaaaacatgtaattcaatttcccggaatgtattccttcttcattttgcttatacttattattagcgtattgcttagacttatcgaatgttagtcgtgacatttgattctgtgatttacctaccatcgttgaatccagcttctcatccggaaagaaatcatccagatccacatctccaatcatagtagtttcaaggaagttcatattcttacgaccggcatccgtgtaatatcccacaaacatgtgtcctggagtacgaactaatattggttctatattaatggcacgaagcaaggaagcaaacagcacactaccatccacacaattaatctgcgaagactccagcgcatcatcaaacgtgcgaacacgctgggaaaagaccacattactggacaaactggtattggaaacagaactgtaacggaaattacgcttttgaagtacgttccatagagcatagacttgcttgtccaccacttcagcattgccaccttgatagcccaagaaacgattgacaatacgggtgttcagtgcttcacgcaacaatttgtcaatcatcggattttcctcattgacgtatgccgcaaagaaaataccggtatcatgaaatttagttccgttcgtgacataccccaacagacattcattaatgctgcgaacagaaaaagtacgaacccgctgccccaaatccttatcattcatttctaccttaacagccacactaaccggttccgcctggttattattcttcagcgcttcgtaattccagataatatcgggatagatcgtatattccgtccgtggtttagccaacacaaactcagatacggaacgggaaaagaacggagtttcagcaacttcaatacgcaccctgctatacgccttccccgaacgaatccggatagaaatgcaggatttagaattacccacatataaggaatcagccggaacaatgacttgagcatccgtcgtcgctacagaaagaatactggaaggaaagatgttgcctcccaactcatccgttatctcaaacccggaacggaacggagccgtattcagccaaaaggaacctgccacaacaaccaccaataaagctatcagagcgggcaaacgccatttatatcgccgaaaatttatattagtcaactctttcataccaatgttatttatattaagacaaaggtaagtataaaaactgaaaaactaggatgtaaaagtaatagtttacagttcttcaccttaccaaaaccgtgtcaaagccttaccaactccgtgtcaggttcgtaccatctccgtacctatacgcttgaacctgatacggacccaatacggagttaatacggacccggtacagagtttctacggatctgacacggagttggcatggacttgatacggacttgacacggaccaaattaccttcagtacatactaaaatgtaaccgaattgtaacacgtgtttcactttcccgtaacaaaaacaccgcacctttgtcgctgaaaagaaataaagtataactttgtggtaggagaatttgttttgaatacctcatattaattagaaaaagcaatgaacgattatcgtattttagttgtagacgatgaagaggacctttgcgagatcctgaaattcaaccttgagaatgaagggtatgaagtggatactgccaactctgccgaagaggcattgaaaatggatatcggtagctacaatctgttactgctggacgtgatgatgggagaaatatccggtttcaaaatggccagcttactaaagaaagacaagaagaccgctcaggtacctattatattcatcaccgccaaggatacggaaaatgatacggtaaccggattcaacctaggagctgatgattacatctccaaacctttctctctgcgtgaagtcatcgcacgcgtcaaagctgtattgcgtcgcacccaacagggagaaccggaacgggcaccggagcaaatctgctacaagacgttagtcattgatattgtaaaaaagaaagttagtatcgacggggaggaagcccctctcaccaaaaaggaatttgagatattacttttactcctccagagcaagggacgcgtattctcccgcgaagatatactggcacggatatggagcgacgaggtctatgtgttggaccgcaccatcgatgtgaatatcacccgtttgcgtaagaaaataggaatttatggtaaatgcatcgtaactcgcttaggatatggatactgcttcgaagctgaataataccacacatttcctgtcgttcagccggaagttatttctttcggtcatttcactgtttctggtatttgccggatgcttcctggcatatcaataccagcgtgaaaaagaatataagatagatctgctggatatacagctacaggactataatgaacggttgcaccaggagcttgcccacattccggacagcttatggaacactactctagaacgatacctgcaaaagtacatcaaacaggatttacgtattacagtagttgatgtacaaggtgacgtattatatgacagcttcgaaaatcagaagttaggtaatcacatcaatcgcccggaagtgcaaaaagcgttggcagaaggaaaaggatatgatgtacgccgtacttccgaaacaacaggagtgccctacttctattctgccacactctatgaaggctacattatacgctccgccctcccctatgacctgaaccttgtaagacaccttgcagcagaccagcactacatctggtttaccctcatcgtatcattactattaattttcatcttctacaaattcacctctaaactggggacagccatcaatcagctacgcgagtttgccaaacgtgccgataagaatgagcctgtggaaacagatatgcactccgccttcccacacaacgaactgggggagatttcacagcatatcatccagatatacaagcgactgcgggaaaccaaagaggcgctatacattgaacgggagaaattgatcacccacttacaaacctcgcatgaaggattgggcgtattcaataaggacaagaaagaaatcctggtcaacaacctgttcacacagtacagcaacctgatttcggactccaacctgcaaacaacagaggaaatattctccatcagtgagttccagaaaatcacggatttcatcaacaagactcccaagcgtccgggcaaggaagaaaagcgtatgtctatcagcatcaataagaatggacgtatgtttattgtggaatgtattatattccaagacttaagcttcgagatatccatcaatgatgtcacccaggaagaagagcagatccgcctgaaacgccagttgacacagaacatcgcacatgaactgaagaccccggtcagcagtatacagggctatttggaaaccatcgtgaacaatgaaaacatttcgcgggagaagatgcagacattcctggagcgatgctatgctcaaagcaatcggctaagccgactgctacgcgacatctccgtattaacgcgtatggacgaagccgccaacatgatcgacatggagaaagtagacatcagcctgttggtaggcaatatcgtaaacgaggtatccctggaactggaagaaaagcatatcaccgtagtcaactccctaaaaccgaagatacaactacggggaaactattccctactatactccattttccgcaacctgatggacaatgccattgcctatgcaggcacggatatacgcatcaacatcagttgtttccgcgaggacgagaatttctactatttcagttttgccgataccggcgtaggcgtctctcccgaacatctgaaccgcttattcgaacgcttctatcgggtggataaaggacgctcacgcaaactgggcggcacaggattgggattggctatcgtaaagaactcggtaatcatccatggaggtaccatttcggccaagaacaaccagggtggcggattggaattcgtattcacactggcaaaagaaaaataatcacttatcactaaccactaatcacttttttccttatctttgcgatgcattggtttactgtctttgttcggagacggtaattaaaagggaatcaggtgcaaatcctgaacagtcccgctgctgtaagtttcatgataggttgcaggcaaactaccaatagccactggaaggccgcttccgggaaggcgcctggcaacagaagcaagtcagaagacctgccatgcactgtttttatcactgctttcgaggaaaaagcgttgagtctaatgaaacgggcaaatcgtcccatcatttcattcatccactctgcttcaaagaaagtaaggaacaataaactctgccaagtttatttgaatggtgtccggtcgaagggatttcgcccggacattttattctgtaactttcccaaaacaaatttcatcatccgcgtgttatacatacagtaaacaattaatacgaagagttatggaagcagattatgaactgatcgacaatgaagaacgtcgccaatatgagttccatgtcgaaaaatatactccaaagattgagtatatgaaatcaacaaatggagagatttacctgacacacaccgaagtacccactcaattaggtggtaaaggcatcggcagccagttagtagaaaaagcattaaaagatatagaaaaacaaggactaaggttagtacctctctgcccgtttgtagcgggatacattcacaaacatcccgaatggaaaagaattgtaatgaaaggtattcacattcaataataaatagttatgaatataaagaaagaatatacgaacggggaagtgaccatcatctggcaacccggcctgtgccaacatgcaggcatttgtaccaagacccttccgaatgtgtatcatccgaaagaaaaaccgtggataacggctgaaaatgcaacgacggaagaattgattgctcaaatcaagaaatgcccgtcgggagcattaagttacagaatgaataacgagaaagaagataaataaaagaaatgaggttaccccttcaacatatgaattcgggtaacctcatttgtattatgaaaaagaaagtagttatgtacgttccaattgaacagtgaaatgacgcatcaggggagcctcccaagtaatacggactccattagtaatactttcacgacggtcgaaaacattcttcaacgctactgcaatcacgttcatgtgattatccgtatatacgcggcggggaatagccaggcgcaataaatccagcccggtaaaacggttctcacgggtaaccggatcacggtctgccaggatataaccgatttcacatcctctgataccagcttcaagatatagctcaaccgttagagtctgtgccgggaattcattcttcggtacatgcgtcagtaccttcgttgcatccacaaagatggcatgtccgcctgctggacgctgatatggaataccatattcatccaacttctttgccagatattccacctgacggatgcgggtttccaaattatcaaattccgtattctcatccagtcctgtggcaagtgcattcatgtcacgaccattcatgccaccgtaagtaagatacccttcatattgcacgcaaaagcctttggcaccttcataccaatctttttttcgtgtagcaatgaagcctcccatattgacgataccatccttcttggcactcatagtcataccatctgccaggtcgaacatctctttcgtaatttcctttatcgttttaccgctatagccatcttcacgcattttgatgaagtaagcgttttccgcaaaacgtgcggagtcaaataatacaggtttattatacttatccgcaagagcacggacttcacgaagattctgcatggatacgggctgcccgccggccgtgttgttcgtaatggtaacgatgataaacggtatgcggtcaccatgttcctgcaacgctttttccagcttcacaggatcgacattacctttaaaaggtatttccagctgagtattcttcgcttcatcgatggtgcaatccagagcaatggccttccgcccctcgatatgtccctttgtggtatcaaagtgagagttccccggaacgatatctccatcatgtaccagataagagaaaagcacattctcggcagcacgcccctgatgggtgggaatgacatattcaaaaccagtcagacgagtgatcacttctttcagattgaagaaggaggaagcacctgcataactttcatcgcccagcatcatcgctgcccattgacgatcgctcattgctcccgtaccggagtcagttatcaaatcgatatatacttgttcggatttcagctggaacacattgtaatgggcttctttcagccattgttcacgttcctggcgggtactcttccgaataggttccaccattttaattttccaagactctgcaaaaggtaattccatagtgcctgcttattattttgacatttagttaacaaaaagacccgtagaagaatttctacgggtcgaatataagcatttatacaggattaagcaaaagtttcactgtctttttgtcaacaaatcattcctttgacagaaatttcttcttctccttcttactcatctccttcatgataatttcaacaggatgccaggacttatacatcacccgctcttcaggtttacctgtttcctcgggagaaagataaaaatcaggtacatatgagtgatccggccgatcggggcaataaatactgaaacgtaaatgggaaccctgcttgtagttctctccgccaatgatgccaagcggctgtcccggaatcacctcttcacccggagagacaaagatcccttcattctgaaataatttataacgggcaaaagttccgtccttatggaaaacttccagataattttccgtcgaatggaacgatgtgttttcagaagtggaagcggaattgtcaacaacttccgttacgagtccgccacgggcagcaaagatcgtgtctccggcagtcgtagagaaaccaagtcccgtgatacgcttctctccttcctttcctataaaattatctaaagacaccatcttattcacacggaccactttcccttgtgccagaggaaagagatacacaaaactggtatccgccttcaagcggctattgccttttttataggtatagcgatatgagaatccaatcggaacattttccgtagacggacgcaaagtcaacaggcgcgttttgccataatgaataacggcatcataaatttctccttcggaagaggtcgtattactcagccgggaaaaagtcatagataccgtataaggcgtatgcgactgagtttcggaatagaaagtcacttcccccttggcagagcgttcatagcttaccgtaacagtcttatccgactgtgtataaaccagtagaggcaagcaaaaaagaagaagacagaaatagcgttgtagtttcatagtatcatgtttttaaaattaatcgacttgccaggtcagcacaaagtctggatgcaggagatatcggatctcaaatttacgctgttccggtgttctgtactcttcagccgagaaggctcctttttcagtaaccgtaaaaggaaaaatacgcagatgctcccggaaatcaacctccggtgtattcatacatttaaacatcacttctttggccgaccaatggagcaacaaagcccaggtatccgttccctgatacgaagacagaggttcatcagtacgcatatacttatgcgccaccttatgtacccgttcaccgtattgttctatatcaatgcccacttccttaccggcttcaccgataatcaccgatacatacccacgtgtatgagaaatactgattgatgcagatttatctgccagatacggtttcccgctgggatagtaagcaatttccttttcctctcccaatagagtgaacagcaacacacgaaccgacagccattccaaacggcgatgttcagcagagaaacgttgcaacccctccaggtatgtttcctgttgcggaagcatgctcagcaattcatccagtgtttcgtccatcttccagactccccacttatatgaaggatacgtatgttgtatgaaaagagacatattattttgtaaatcaatctttcttatcggaatccgacggaggagtgttgatggtgaacttcactttaagaatacggcggttatccatctccagaacttcaaattcatagtgatcgtaggtaaccttttcatgcagggccggaaattcacctttcagctccagcagtaatcctgcaagcgtatcagaatcacccgccacttcatcaaagacttcctcgtccaccttcgtgatcttataaaaatccgtcaactgagttttggcttcaaatacccacgtatgatcgttcagcactgcatacgtacgttcttcgtcatcatattcgtcgtgaatctccccgactatctcctcgatgatatcctccatcgtcacaattcccgatgtgccaccaaattcatcaaccacaatggcaatatgaatcttattggcctgaaaatcacgcaacaaatcgtcaatcatcttagtttccggaacaaaataggccggacgtatcagtgactgccaacggaaatccaccttattcaaatggggcaacaagtccttgatatataagatacctttgatattatcccggttctcggaataaatagggatacgggagtaagcattttcgataatacattgcaatacatccttgaaaggcgtgcgaatatccagatcgactacgtccagacgggaagtcatcacctccttcgccgtttcaccgccaaaacgaatgatgccttccagaatattattctcttccttcagctcagccttatccgtcagttcaagggcatgagaaagctcgtctaccgagatgttatggtttttgcgggcaaaatgcttgttcaggaacgaagtggaacgtaccagcatagaagctaccggataaaaaagggaacgaaacatccagatacccggagcggagaagcgacagaaagccaacgtcttctgggctgaataaatcttcggcatgatttcaccgaaaagaagcagaaggaaggtcaggatgacggtcagtatcagaaattccgcaataggagaatgaaactcaaacacactcatgaagaagaagttacagagcatgataatggtcacattcacaaaattgtttgttatcaggatggttgccagcaacctttccgtgtcatccaggagtttacgaattttctcatccgagggatgtttcttctcgtcaatggcattcaggtcggacggagaaagagagaaaaaggctatttctgaagctgaggcaaagccggatacgagcaacagcaagcctgccaacacaatggcgatgattgccgaaatagtagggccatgtacggatataccattaaaaacatttgccaactggcataaataagcgtctgggtccaaagatcttggttttagttaaacaattagaacggtaaatcgtccgttgtattatcttgtgcaggggttgcctgcgattgcaccataggttgtgcaggagcaccttgtgacatacccggttgcggagcggcagcacccggtgcagcagttcctctggggctcagcatttccatagagtccacaaagatttccgtaacatagcgctttgcaccggtctgatcatcgtatgaacgggtacgtattttgccttccacataaagtttatcccctttatgcacatatttttcggctgtttctgccagtccgcgccaaagtaccagattgtgccattccgtccgttcgggtacctgcgtaccgttagccaatgtgtatgcacggtctgtagtagctaaaggcaaagaagccacagcgataccggaatcaaggtatcttacttcagggtctctacctacatttccaatcaatattactttatttactgacataagccttttttctttttatttgaatttgctgccaaaattaaacagaataatcacacaatgcaagagttagcgcaacttttatagatatttctccagaaaggcatgcaccaggcgagagactgcatactgctccaaatcctctattttcacccgcagaaaggcagaaaaagaagtagaattttccggtaaaacaacttcatagaaattggtataaatcaccctgtgggagagcacatgcttcacatttccactgattaaacgcaatcccgaaacctccccatctgcaaaaaatgcacgtacctgcggcaattcacgaaactcttcttccgtcacaggtgcttccgtttctatcagtggaaattcgaaaagatttttccagatatcatcctccgtccgtttatgtaaataggtacacgcgcccacacgtacatatatatagttaaaataacgattggtggttttcgtcttatgctgctttacaggcaacttcgttatcgtaccctccttcagggctgagcaactgtctaccaaaggacaaaacaggcaattcggtgattgcggcgtacattgtatggcaccgaaatccattatcgcctgattgtagacagcaggctgcaatttatccatcatctcatctgccaaagcagcaaacaatttcttgccttccgtactgtccactggcgtatcgatgccgaaatagcgcgaaagcacacgatagacattcccgtccaccactgcataaggcataccgtaggcggatgagcagatagccgcagcagtatagtcccctacccccttcaacgcacgcaccccttcataagtaaccggaaaaacaccattcatactttttgccgccgcatgcagattacgtgcacgagaataataccccagtccctgccagcatttcatcacctcatcttccggtgcttcagccaaggctgtcacattaggaaaacgatgaataaaacgcaaaaaataatcataaccttgtgctacccgggtctgctgcagtataatctctgaaatccatataatataagggtcggtggtatcccgccaaggcaattcacgcttattttcggcataccaggctatcaatttctcactaaatatattcatctctattacagatagttataaaagtctaaaaagggcaacatctttcgcctcggacggctaccttctttgtaattcatggctatatccctaatataaaagggtgtagcccttcctacagcacaaaaatagttctttttcccccaacaaaccttaatcaaaagacttttttagaaaattgtccagaatatattttttagagagcgtaaaaagctatatatttgcagtccaaaaaattaggaaactatagtaataatattttttttaaagaaaaatgactaaagctgatattgtaaacgaaattacaaagaacaccgggattgacaaagtaacagtgcttactacggttgaagcgttcatggacacagtaaaagcatctttatcaaaagatgaaaatgtttacctccgcgggtttggtagcttcgtagtgaagaaaagagcacagaaaactgctcgtaacatctcaaagaatactacgattatcattccggaacacaacattccggcatttaagcctgcaaaaacattcaccatctccgtgaagaaataataaacaagagtattaacctattaaattattgaagctatgcctagcggaaagaagaaaaaaagacataaaatgtctacgcacaagcgtaaaaaaagactaagaaagaacagacataaaagcaaaaagtaatttttagtctgaaggacagaaataaagaacaaacttgtgaagctatttgtctcgcgagtttgttctttgtttaagtaacaaattgtagtcggcaaggctatttgtatcctcgctgactttagaacctaaaaaagcaagaaaaaattgtgacaagcgaactcgttgtagacgtacagcccaaagaggtctccattgccctgctcgaagacaagagcctggtggaacttcaaagcgaaggaagaaatctttctttctcggtgggcaacatgtatttaggacgaatcaagaaattgatgcccggcctgaatgcctgcttcgtggacgtgggttacgagaaagatgcttttcttcattatctggacttaggtcctcaatttaactcgttagagaagtacgtaaagcaaactttaagcgataaaaagaaactaccgcaaatcaccaaagcaaccatacttcccgatcttgaaaaggatggcaccgtagccaatacactcaaggtgggacaagaagtagtggtgcaaattgtcaaggagcctatctctaccaaaggtccgcgcctgacttccgaaatctcatttgccggaagatatttggtgctgatacctttcaacgacaaggtttccgtatcacaaaaaattaaatcgagcgaagaacgcgctcgcctcaaacaattgctgatgagtatcaaaccgaagaatttcggagtaatcgtccgcaccgttgccgaaggaaaacgcgtagccgagctcgacggagagcttaaagttttattaaagcactgggaagatgctgtcaccaaaatacagaaagctactaaattcccgacattgatttacgaagaaaccagtcgtgccgtaggcttattgcgcgacttgttcaatccttctttcgagaacatccacgtcaacgacgaagccgtgttccacgaaatcaaggattacgtaactcttatcgcccctgaccgggcaggaatcgtaaaactgtataaaggacaactccccatttacgacaattttggtatcaccaagcagatcaagtcttcatttggcaagacggtttcatacaagagtggtgcctacctgattattgagcatactgaggcgcttcacgtagtagacgtgaacagcggtaaccgcaccaagaatgccaacgggcaggaggccaacgcacttgaagtgaatctgggagctgccgatgaactggctcgccagctgcgactgagagatatgggtggtatcattgtggtggacttcattgatatgaacgaagccgaaaacagacaaaagctttacgaacgtatgtgtgccaacatgcagaaagacagggcaagacataacatcctaccgctcagcaaattcggactgatgcagattacccgccagcgtgtgcgcccggcaatggatgtcaataccacagaaatctgtcccacctgtttcggaaaaggcaccatcaagtcctctatcctctttacggacactttagagagtaaaattgactacttagtcaacaaactgaagattaagaaattctcgttacacatccacccgtatattgctgcttacatcaaccagggactcgtttccctgaaacggaaatggcagatgaaatacggatttggtatcaagattattccaagccagaaactcgcgttcctggaatatgtattctacgacccgcaaggggaagagattgacatgaaggaagaattcgaaattaaataagaaagacggcgaagtaaatcagaaacttcgccgtcttttttgttttcctcaccaacttttcaaaattattggccgatatctaaaagaaactcaccctctatacagaagcgaacatcactcccctgcacatgcaaggtgataaatctctttactgtcctgctttgtcagtttcacataattcccaaccaactctcctttattgcggtgtagactatccgccagacggtcaatatcaggattttcaacacccagttctttaaatgtcacaggcagaccaagagagctaaagaaagctttcagcttaccaataccctccaaagcaaccgctttcttatcttctgattcaggaacgccccatacacgaacggcatattgagcaatctttcctacattatgctctaccatccaagtcatccaggcggggaagataacagataacccagcaccgtgagtaacaccataaatagcactgatctcatgctccaggaagtgcgaagcccaatcttcctcacaacctacgccacaggtaccattatgcgcaatcatgcccgcccacatcaagttggcacgcgcaccgtaatcttcaggatttctcattaccttgggagcttcattgatgatagccatcaaagtgccttcacaaagacgatctccaatttccacctcctgagtgttcgtaaaataacgctccatgatatgagccatcatatcagccacaccgcaggcggtctggaagggtggcaaagtataagtaagttccggattcataatagagaataccggacgcaaaacttccggtacacgcagactgagtttctgcaaaccgtccagtttcgttataaccgtattaccggaaccttcacttccggcagcaggaatagtcagcacaacagctactttcagcgctttagtcactttagcctttccgatatagaaatcccagaagtcaccttcataaagcacacctgccgctatggctttggctgtatcaatgacagaaccaccacccacaggcaacagcatatcagcctgttcacggcggcagaattcaatgccttcatacacttttgtatccaccggattcggctgcacgccccccatcaaacaatattcaatccctgcttcctgcaaggattgcttcaccctatccagcaaaccactccgtacaacagagccgccgccgtacacgatcatcactttccgcgcaccatgcttccgcgccagtgcaccgacttgcatttccgtagccttaccgaatacaaattcggtaggactgtaaaagacgaaattattcataatttattatattattatatgcgaaataccggcataaagtagtatagccataataagtgcttacgtttctccacaactgaagagataaaagtttccacaactacatcataaaattactgaacagaaagaagcaagcatcgccaatctccggaagttctttcttgcgggaaagacgaatgccgcaccgggaacaaaaatccttcaacaggaattcagttttgttatcttccacctcaatggcgtgaggtttattaccctgctcgcgcaaaacattgactaacttcaatagtaactcctctggattgttgttcaaagcattctgagtcaaaatgggaaataccaactcgttggcggtatccaaacaaagtaatacggtagggaggtaaggagcttcatcctcatctgcatctatgggcgtcggcatatgcagatacttcatttgtaatgtcccggaaacaggcaactttttcatctcgcctgccagtatgtcgttggcaaactttggtgcaatacactcatcaggcagaaaagcaggaagctgagtaatattccactcgtatgtaccatcggaattgggaataaggtacggaacagattttccaccctttgcggtaggatagttgccatttacatcaaagcccagctttacaaagtcagaggttgtcacctttaccgccacagcaatagcggcccgaagcgcctcaacgatatcacgcgcatcctccatacaagtgatgccatactgcatctttccaggctgatgccgggtaaagtcaggccagcctttagagcgtcgaatcttcagcttatgggcatcggcataattacggatgattttctttgttttcacatccatgtcagatgcttgcataaagtcgcaattgatgcaatcgaaagttgttgtcatttcaaacatttcgatttctgagagatgtgcattgcctgagctgatagttttcaaataagtagtaaaaccttttcgccctcggtagaaacccaaggcaagatgttcacctgcatttcccatcacgcaacaatatccggtttccccatcggataggcgaaatgcaaatacatcactatctgtcaactctttccacaattctgtgtctcgatattgaaatgctaccgcaagcatgtcgtctacaagaatcatttttcttattatttatggttataaatgtattattttgttcaaagataggaaaaaaattgaaacttagcgcaggacgcagtaataagcctgataaatagcacggtgctttctttttttgctaaatatcatgtcgttttcgggaataatcaatatctttacatgaaatatcaagttaaatcagttgaaatgaagcgtatcaatagattaaaagtcgttttagtagagaacgttgaaactttcgataaaatagctaatcttctgaatgttgatatgaaagagagattctatgactcaagcggttatattgcccaaataccgtagcgatttgagaatagttttaaaagaaataataattaaggagtgaagggcaattctaacatttagaagtatacatggaacaacaagatgaaatcatcatatatcagtctcaggatggtacgataaaagttgatgtactattctctgaggagacggtttggctgacacagacacagattgggtctctgtttggaaaggctaaatctactataagtgagcatatcaaaaatatcttcgaggaaggagaactgaatgagaatatggttgttcggaaattccgaacaaccactcagcatggtgcgatcgaaaataagacccaaagccacgaagttaattattacaatctggatgtaattatctcagttggctatcgggtgaaatctgtgcaaggtacacagtttcgtatttgggcgacacagcgtttgagggattatatcatcaagggatttgctctgaacgatgagcgattcaagagcggctcgtcaatgaactacttccgggaactgttagacaggattcgggagattcgcttgtccgaacggcttttctatcaacaaatcaaagatatttatgctacaagcattgattacgatccgtccgatgaaatgacccttgacttttataaagaggtgcaaaacaaacttctttgggcggtcagcgggaagactgcggcggaactgatatattatcgggcaaatgccgcattgccgcaaatggggctgacatcgacatctttacccaataaagttcgtaaggcagatgtggaaattggaaagaattacttgaatgaagaggagattgggcttttgaaattgatcgtagaacaattccttgcttatgcagagactcaggcaatacagcacaaaccgatgtatatgcgggattggattgagaaactgaagcaggtacttacgatgaatgataaaaacatattggagcacgcgggatcaatctctcataaattagcactgcaaaaagccgctggtgagtatgacaaatacagggaggtacaaaaacagttggagcgattggaaagcatcaaagaactggagcaggatattcaaaaactgaataaaaataagagaaaaaagaaatagtctaaattttaaattataacagagactgaaaaggattcttggtctctgttataatacttctaaatattttggttatcaacaaaatctcttcatatatttacatagagttatttgaggattatattattcaatatatttactataacgttcgaagaagcgcttgagcgccccccatttcatcaaccctttttcaaagacaaagatacccaggagagcacagaatattcccaataatacatcaatcaggtaatgatgccccgaataaacagccgtgcaccagatacccaccataataaacgcgaataatgctatcagccaacccttacaacggttcattatagcataagccaacgccacaaccatatatgccgcatgcagcgaaggaacggctgcaaatacgtttgcattacgcccatagatagagtcgaagatcgtgcatcccagcagttcgtcaaagcgccccagtccggccacatttcccggagtatccagcatcgcctcaaatccatagttcatagcataccaggggggagcggcaggatgaatataatatccggcaaagccaataagattaaccaacaggaagaccatagcaaaacggagatacatctggcgatctcccttcagataaagccacaaaccgaaagctataggcacaggcacccagcagagatagaacactccggcaaagaaatcagctatcggccagtgatgtatggcaaagtattcacaaggaatcagcgtatctccattcacggatataccgaaaagagacttttccgcttcatacaagccctgcacatcaatagggttcacctggtaattgggatacacccgcatccagtcataggaaactgcaaaaacaacaaaaggcagtaaagccactgccagcttacgggttgtctttcctgcaaaaaacagaaccaggaacaagcccgtcattagaaaatgctccgtacgaagcccgatacaagtagctgtcagcaacagaaaagccaacgtaatgactaccagcaataccgtctctcttaccggagggaaatatctatttatcatttattcaaaagtttatagcaatgtgccagacggacaaaagccgtcagattagccaatacggcaatgattgccagaggaacaatcagaatcaacatcgggtcgaagagtgtgcaatcggaaaatataccgcagaacaaagctcccaaactggtcagcaccactcgctcagggcgctgcataataccgactttacattccagtcccagaccttcggcacgtgcgcgtacgtaacttaccatcagcgaaccgatcaaagcaagaaaagtgataatggaacccacgaaatagccctgcaagatgagataataggatataccgaataaggtaaacagttcactgtaacgatcgagcacagaatcgtacaatgccccgaaggtggaagacatattgccaagacgcgctacacggccatccatcatgtcaaacaacccggcaaagagtatcagtccgcctgtccatcccaccaaagaaagatcctcttccgaatctgtcactaaccctgcataaataaatataccggcagccacaatgttaagtatcaacccggtagtagtaataaagttaggcgtaatgccaattttaatcatgccacgcacaacgggattgataatcttgtatatcacctgttgcagccaatctctgtaattcatgttcattctatttttttctccaaacgttgtttcagaaatctttttaagttgtggttccggtagacgaaaacccgttgcaaataatagttccagaaaaatgcaaccagcaaggcaaccgtaattttagacaggataaacacgtcataaacgtagtatcccagcaacccgttcacccatttcattcctgccagccattccgtcaaagcaaaagtaccccatgtattgataaggatgctcccaccccagactatgaaatacttcagccccacatgtatcttcttgcagtcttccgccttaaatacccattcatagttgattacacaattgacaataccgccaaccacagaacctataaatgtggcatacaaataatatataccaaataatttcaccaaaagaatagttatcagaaaatcgatcaccgtagctatctgtgcagaaagctgcgccttcataaaaagccacacttccctgcgccaacctgcaaaccgactctgttcttctactccatcaaccatcttgccacaattaaaacaatgaaaccatacactcctgccaatacgtcgtccatcatcactcccactccgcccggaagattttccatccgccggatgcccagcggtttcagaatatcaaagaagcggaacaaaacaaatgctgccagtccataccagatatgacctgccggagctgccaggagcgtgatccacacacctaccatctcatccaccaccacgcgcgacggatcttcaccccagtagggttccagacggtcggtagcccaaataccggctacggtgaacagggatatcaatgcgacagtcgtccacaacagacaagtttctgatatgagtaaagaaagtccgaaccatattagcgtagccagtaaagcgcccgccgtgcccggagcaaagggagaaaagcctgagccgaagcccgtgcctatcaggacagggaagaaggaaggtctcctcatagaaaaaagatataaaagagtgataaggtgacaaagtggtaaagcggtaaagtaatactacatcaccactttatcactctaccaccttatcaccttattattatttattaatccagatagctcggtgatttttcacccaccatcgtacggattgtttctttcaccattctccattgagtgaacagatcatggatcggttcatgctcaaagtcgtgcatcgggctcttgcagaagaatgacaaccaagtctggattccagacatacctgcacgtaatgccaggtcactgaaaataacgaggtcgagtgcaataggagctgcaagaatagagtcgcggcacaggaagtttactttgatttccatcgggtaacccatccatccgaagatgtcgatgttatcccatgcttccttattatctttacggggaggatagtagttgatacgaaccttgtggtaaacatcaccatagaggtcgggatatttttccggttcgaagatgttatcgataacagacaacttgctgacttcttttgttttgaagttttcgggttgatcgagcacttcgccgtcacggttacccaggatgttggtagagaaccaaccgcttacacccagcatacgagtcttgaacatcggagcgagcactgttttcatcagcgtctgtccactcttgaagtccttaccggagatgggcacattcatcttcttagagaattcccacattgccggagtatctacgcacaagttaggagcacccatgatgaacgaagcaccttctgcaattgcagcataagcgtagcacatactcggagaaatcacttccgtgttattagccttcattgcttcttccaaagcagcaagcgactcgtgttctttacacaacggaacgtagatttcagtacttgcagcccacagcacagcaatacgctcgcagttgttggcagccttgaagttacggatatcctcacgcagttgctccatcatttcccaacgggtggcagcctgcttgatgtatgtaccattcagacgttttgcaaagttgtggtcaaaggcagcaggcatcggtttgatggcttgcaattcctcttttaccagatttaaatctttctctttcagaacttctgcatacatcgcagcttcgtatgcattatcagggaagatatcccatccgccgaaaacaatgtcgttcaaatctgccaaaggcactacgtccttaatcagcttttcgtcgttgttctccatgcgtattgtggccatctgtgtaatagacccaataggttttgccagtcccttacgagcagccaatgtacccgtgatcatggtggttgagaccgcgccacccactccgactaccagtacacccaaacgaccagttgccggcttaatgttttctttcattgccattgtatcttttaaagtttaaaaaattgctcaaatttaggctattttgttcaattgagacttgtcattttatccgatttaatgttctattagtaagatttaagttaaaatgtcatgtgcagactgattctaagaccggatttatcaattccaggcagatttctgtaagttaatcgccatacataatcgaaacggagaaccttcaaaatattctctacaccgacacccacctccatataaggggtatcccccatataagaggttgtgacgggaaaacgaaaaaggtcattgctgactgtcggattatttttgtcgctcaaattcccgtacaatccccgaaacgaaaggacttcacgccatttcaactttttcagcaaaggtacgcggttgaacaaaaagccattttagatagtaagtaacatcccacgaagcatattcatcattcataaactccatggcattcatcagggagtaagactccggctgaatggtataagagaggttggcgttcgggataatcagtaacgggaaaggtactttattccaaacttttccggccttcaggataacgtctgtatagccgaaggccgaaaaccagaaacgtttctgaaaacctgcctctgtatattgataggtataatcaccgcccaatactccttttgcagccatcgtatgcgaaagcgagaagaccggagcatccagcgataccggaaagcggttccattgcgtctgaaagaatttttcattcggcgcataacgcaattttacttcaaactcggtattcgatattttcttcacgggcgttgccatctcatcctgtttcaggaaagggataagatacgaagactcatcctgccggaagcgggaagtgagctgaaaggagaaaccggaatggaactcattggtgtaagtcagctccgccttgcgctgatagcctatccggtcgtccttctggcgctttaagctcagaaatacgttgtcctgactggtataaaggtaatgttgcccgtattggtttacatccgaggtatatcgtgctttcaaagagtgaataggaaactcattggcatactccttcttcttatggaaagaatattccacttcagccattcccttcatccgatggtctttgaaaccgtaagccatgtatcctttatagaataggtgtggattgagccacgccgtagtcatacctcccgcacgcagacgcacaccttccagggtgttgccgcttatggtggtattcatcatacctatatagaacaggggttctttctctttaggcgcgggtatatatccggtaaacagcactttcaaggtcttctccgtccagtaatagacaggatacgtgcgaagctgcgccatcattttatcaacggaagtttctttcttgctgacttccacctgacggttatcgtcccagtaggcttctgtgcgatgcgttgcttcggccggctcaatcactttttccggcttcttaaaggccgaaagggcatccgcagaaggttcatacacatagttcctgtaatatacatcccgcttggcatagataccgtcactgttgtccaccagtttaaattcggtggtgatatgttcgtcagccaactggcgcgtaccgtctgccccacgggtaaagttctgttcaagagacatataatccacaaaattcagattgattttctgtggaaagttcatggtggcacgacgcacaaaataggtactgtccaaagtaacgtacaagtgtcccgtaaaaccgaaggattcggaattgaagggtacgaacgtcaggtccacacaaggctggcccgctatcgtaagcgtatccatcagataatatttatagaatgaagggcccagtgaagagagcggacttacgaacttattggtaaacagcgtgatgttgttctcataaatatccacatccgtcatcgtcacactgatggcttgctccatgccttgttgcgaaagcatctcatccacaccagcctgtcggcgggcatgtacgcgctgtttctggcttttgggagatttgcggtaatagtccgtagccagcagctcacggttagaaacggcaagcacgggctttcccgtaacggcggaagtatccacatagtccgtcaggaacttgaatttacgataaagccacttctgttgctttacgctgtcgaagttgttgatggcaaaggtcatcttctcataacgatcccgttgccagaagtccaactctttgggcgaatagtcatcccgatgttctatcatttgtcgcacaaattccacggcgggattatcttttttcttatatcgctcccgtttgggctttaccaccacttcattcagggcatacgttgccggtgaaagggcgatggtaagacggataccttgtgccggatgaataagacgggtgtattcattatatccaatggcagaaataaccagcacggcttgggggcggtaggtcttgaaagaaaactgtcctttgtcatcggtcatacctccttcggtagtacctttcagatacacagatgtatatgggagaggctcacgggttaacgagtctgtaacaacaccttgtaccacatattgtgcttgcagggggaagctcatccagcaaaggctgatgaacaataaaatccttaaaaaagtaaacctcatacctatttttatattaagtgacaagctacgagctacaggctacaagtggctgcgctataccgacaagcgcaagttattgccacttgtagcctgtagcttgtaactcatcacttctttcttccttctttaacgcccgcaaaggtacgcaagaaaactattttagaaagttcagttttactgaataaatgttctaaaaaaccacttttgcacgaaacacttccttttgcaggctgttgtatatatcttaaacgacgcgaaaagcatcgaaaaccaattaataacctaaacaacttaattatggaatggataataaaccagctcagggagcgccccgaacttgccatattcctcaccctgtttctggggttctggcttggcaagctacgcatcgggaagttcagcttggggacggtcacaagcgtattgcttgtaggcgtattggtaggacagttgaagatcgacgtgccaggccccatcaaatccgtgttctttcttctctttttgttcgccgtcgggtataaagtagggccgcagttcttccgtggactgaaaaaagatggacttccccaggtaggctttgccgtgctaatgtgtgtatcggtattggtggtaacctggcttctcgccctcgtgatgggctacaatcccggtgaagccgccggattactggcaggttcgcaaaccatctccgccgtcatcggagtagccgaagacaccatggcaaacatgggactggacgaagcgcaacgccaaagttatatcaatatcatccccgtatcttatgcagtgacttacgttttcggtacagcaggttcagcctgggtactctcctccctcggtccaaaactattgggcggactggagaaagtaaaagctgcctgcaaagaactggaagccaaaatgggtagttccgaggcagacgaaccgggcttcatgcacgccgcacgccccgtaaccttccgcgcctacaagatagaaaacgaatggttcaagcaaggccgtcgggtgatagacttggaaatgtacttccagaaagatggcaaacgtctgttcgtagagcgcctgcgcaagcaaggagtcgttcgggatgtatccccgaataccgtattgaatataggagacgaagtcgttctcagcggacgccgtgaattcgttatcggcgaagaggactggataggcaatgaaatacaggacgcacaattgctcgatttcccggcagagacgttacctgtcacggtcacaaagaaaacgttcgccggaaaaacagtggcgaatatccgccggcacaaattcatgcatggcgtcagcatccgcagcatcaagcgtgcgggaattgaaatacccgtattggcacagaccaaattggatgccggcgacgtcatcgaagtagtgggcaccaagcaagaagtggaaagtgccgctgtacaaataggatatgtggatcggcctacccaccaaacggatatgatattcgtaggattaggaattctgataggtggtttgttcggtgcattatccatccacatcggtggtgtccccatcagtctgagtacgagcggtggcgcattgatagccggattattcttcggttggctgcgcagcaagcatcctacgttcggacgtattcccgaagcttccctgtgggtactgaataatgtagggctgaatatgttcatcgctgtagtgggaatagctgccggaccgagtttcgtacagggtttccgggatgtcgggctcagtttattcattgtaggtgccatagccactaccttgccgttaatcatcggtttactactgggtaagtacgtcttcaagttccaccctgcaataacactgggatgctgtgccggagcacgtacaacgacagccgcactgggagcaatacaagatgcggtggaaagcgaaacgcctgcgctggggtatacggtaacgtatgctgtgggcaacaccttattaataatatggggtgtcgtcatcgtactgctgatttaacccggcggatatatcatacaactgatataccgtatgcaagaaactaatcgccgcgatgcgaagaattaatcttcagaatgcacattattattcttacaacagctattgtaagaaagaaatatatctatcgtaagaaagtaacacagctgttgtaagatacaaaaacaattatagtatgaataattttatgcatttccgaaaatagattcttgcatcccgagagttagtttatcacactcccaggattagtttattgaaccaaaagattatatgataacaattaaaacttaacgatatggataccaaaaacttagaaaagaaaatggaaacgatcagcccattcgagctgaaaaaccaattgatcgatatggccgatgaaagcctgaaaaaaactgcccgcacgatgctgaacgcaggacgcggtaaccctaactggatagctaccacccctcgcgaagccttcttcctcctgggacagttcggactggaagaatgtcgccgcgtcatgaacctccccgaaggcatcgccggcatccctcaaaaagaaggcattgcctcccgtttcgaagccttcctcaaaaagaacaacgccgcccacggtgccaagctcctggagcaaacctataactacctgttaatgcaacatgccgccgatcccgactccctggtacatgaatgggcagaagccgtcatcggcgaccagtatcctgtgcccgaccgcatcctgcacttcaccgaaatactggtgcaagattatctgtcgcaagaaatgtgcgataaccgccctccacgaggcacattcgacctctttgccaccgaaggcggaaccgccgccatgtgttacctcttcgactccctccaggagaacttcctgctggataaaggtgacggtatcgccctgatggtgcccgctttcaccccctacattgaaattccgcaactgagtcgctaccagttcaacatgatagaactacatgccgaccgcatgacggacgacggattccacctctggcaatacaatgacaaggacatcgaccgcctgaaagatcccgccatcaaagcgctcttcgtgaccaatcccagcaatccgcccagttacgccctcagcccggagacgatggcacgcattgtcgatatcgtaaagaatgataaccccaacctgatggttatcacggatgatgtatacggcacattcagcccacacttccgctcattcatggccgaactgccgcacaatacgctttgtgtctattccttctccaaatacttcggagctaccggttggcgtgatgccgtcatcgccctgcacgaagacaacatctacgacaagcaaatcgcccgcctgccggaagataaacgcaatgcgctgaaccgccgttactcaagcctgactctgcatcccgaaaaaatgaagttcatcgaccgcatggtagctgacagccgacaggttgcactgaaccataccgccggcctgtcattgccccaacagatgcaaatgagtttattcgcttccttcgccctgctggataaggaaaacaaatacaaactgaagatgatggaaatcattgaaaagcgtctgcatgccttgtgggataatacgggattcacattgataaaagatccgctccgcgtagggtattatacagagatcgacatgctggtatgggcaaagaaattctatggagatgatttcgtagaacacctgaaacgtacctacagcccgctgaacgtcgtattccgcctggcgaaagaaacgtctctcgtcctgctaaacggcggcggcttcgacggtccggaatggagcatacgcgcctcgcttgccaacctgaacgaaaaggattatgtggtcatcgggcagggcatcaagcggattcttgacgaatacgcaaaggcgtggaaaaagactacggaaaaataatgcggaaccgtgtcaacccatcactgtacgtgcgcaaagagaacgtacaaccatgacgggtaagcacctcgcgaataaacaccagaccgattccctgcccgttcggtttggtggaaaagaagggactgaagagctttgcttcagtctcttttgttataccggggccattatctaccacttcaatcgtggtaggagcgattgtacggactacaaccctaccctgctggatcgttccttcgggcgcatgctctatgctttccgcagcattcttgataatattcaccaatacctgttccaagagtgccgcatcaaagcgtaccggttccagcttcggatcacattccagccagagaagaatattccggtcgttacacataccctccataaagcgtttacacatggaagccaattcattcagtttgcccgtaaccaaggcgggctcaggaatcttcacgacatcggcaaaacgggtaataaagcggctcatggagaagcaacgttcggtacaaacgcgcattacatcgcagatatcctccatatcctcttcggtggaaagagcttgctccacggtatcgagggtagatgtaatacccgccgtcgtattgttcacctcgtgggcaatcatgcggatcaccttctcatacgctttcttttcagcacgcatcacctcgtccgtcatcttctctatcagatagaaagggtgatgaaaacctctgtcgataaaggaggaatgggtacacttatagatattcgagtcattcagacgcaccactgccgtctgatcttttgagatattcgccagttcttcagccaaaggagagtctatattctcaattttctttcccataatctcttccaggcgtactcccatcatcttcaatcccatcggattgagctgggatatttcaccgttcagtgtggtaatgacaactcccatcggcgaagcctggataagcaagtccaggaaatggttttgctcgcgcagacgcaaacgttcgttctttaattgctccatcatacggttgaacacatttacaatgcggtccgcctcgtattgccctactttgctgagcctgctgctgaaatcctgttcccgcagcaattccataccgctgccgataatattcatcggtttcacaatcttacggtagaagataaacaggaacaccaggataaatgcaatgatcccctccacaatgtagagatgcaacggcttcatccccttcgccaagtagagaagcacaccacctaaacccagaaggaaaaggacaagtatggagaaatagaactttattctcacttttctgtgactgttatattaaacttttccagtcggcgatagagtgcggcacgactaatgccgagcgtcatagctacctgactgagatttcccttatggcgatcgagcgcctgcaaaatagtctgacgctctatttcatccagcgtcatgcctgccagagacgatgcgtccgaagccttcaccggttcattaggacgcagatactgtgcgtcgaaatccgaagcatccagcgtcggttttccgctgacgaggatcgtacgttccaccagattcttcaattcacggatatttcccggataaggcaagcgggaaaggaagttcagggcatctgccgagaattccgtgcggggcagtccgttaatctctgcctggcggtcggcaaagtggcgtgccagcaaaggaatatcttcacggcgttcgcgaagggaaggcaacttaacggttatcaggttgatacgataaaacaaatcttcgcgaaatgtacgttccgataccatcttgcggaggtcggcattggtagcggatactacacgtatatccgtcttgcggggacggctgtcacccagcacttcaaacgtctgatcctgcaacacacgaagcagtttcacctgacaggaaggatcgaggtcacctatttcatccagaaagatagtacccttgttggcaagttcaaagcgccctacacggtctgttgtcgcatccgtaaaagcacctttcttatggccgaacatttcgctttcaaaaaggctctgcgagataccgcccaggttgacctttacaaacggctgtttcacccgctggctgttgatgtggatggcttcggcaatcaactccttacccgttccactctcaccggtaatcagtaccgaggcattggtacgcgcaatgcgtgccactgtattcagcacttccatcaatccctgagattttccgatgatatggctgcggttcagcgtctcgctctgttcttccggtgcatctttcgggacggcagtcagttcaagggctgtctcgatgcgttgcagcaaagcggcattgttccacggcttcgtgataaagtcgaacgcgcccgcctgcataccctgcacggcaagttgtatgcttccccacgccgtcatcaggataacgggtacatcggggcggaatattttcacttgcttcagcaaagtcaatccctcttctcccgttgtggaaagggtgaagttcatgtccatcaaaatgagggcaggtgcctcggcacgcaccacatccattgcttcgcgcggtccgggaacagtttgcgcttcatatcctgcacgtttcagcataaaactgagggaagaacgtacggcactatcatcgtcgattatcagtatcataagatttcgttgttttatggtttgcaaaaataaacgatttcacacagaaagcacagaataacactgtttttttcaataacaaacgaaaaacagttatgagttataagttattattcataactcataactcaaactcagtctctcacaatttcttcaaagtccgcctccagctcacaattccgttcaaaatcccaaagtgtcagactgcggatttgatagaaatagtaccaataataataaagctcggaaatatgtttctgccttgcttcatcttttgatttctgtgcgtcgttcaggtccagcgtactgatttgtccgatcataaaggtttccacactggttttataacgtttctcggcaatgccgtcagcttcctgtgcaatacccaattgttgtgcctgattattgaagttcgctacgagcaggaaaatatcctgattgaagtccatctgttcctgacggattctggaaagcaccacttcacggttactctttgccacacgtacttttccgcgacgttttccccagtccaagataggtactttcacacctacctgcacaatctgattatcaagcagccccttgtaagcggaagtcaaatcacgatcctgccctgtataacccacactggcaaacaggtcgatgctgcgcaaattgccgcgagccgtagccacttcatagtccgcttccaactggcgacgacggatattctgtgcaaacgagttccgatccagagccttgctcaatacaagattatattccatcttcatatccggtgccgaattcggcaacatcggattcagattctcatcttccgacaaaccgaggaacgaacgcaactggaacattttcgcattcaggttactctccgcttccgtcacatccgccttaccttgcaaagcattcagtttcaactgcaacaggtcattttcagaaatctgccccatcttgcgctttgccactgctacttcatagaggcggtcggcattcactttattctggtgagcagttttcaaattttcttttgccagcagcagattgaaaaaataagtgattgtcttcatcgttacctgttccgtagcagtgataaaagcagcttttgcttctgcatatctcaccggttcgatacgacggttccatttcaggttgttcactccgaaaataggttgcgacaattccaggctgacggggacggacataaaccgtttatctcctccggatcctaattgcttgatatattcaagagaagaagccagtgacagtttaccgcccgtaaaccataagttctggtctatggagagcgttccggaaagtcccagcgtattgttacgcacaaatgagtaggaaccatccgagttttgatatctgctgtaagatttattgtaattgggtaaagtaccgttcagattcacttccggtaacaggtcggcacggaaagtacgatattcccagtatgaagtcttcaattcattcagcgctacggcggcatccactgactgggtacgtgccaaagctatcgcttcatttaaagtgatgagacgttcacgttcgtttgtcaatgtatcgttctgtgcaaaagcggcgaacggaaatagcatccaagctgcgagtaaaatattccttttcatatttatcaaaaaatagttgtaaacagaaaagcaaagagcgtgccaaagcgccaggatgcttctgggcaggggtgggtgttcattatcggacagtaagtacgttcagaaatggacatcttctttttacaaaacaggctccagtatctgataatctcttattgccatcttatttgttgctacaaaatagatcttatgttccttgaataaacgggtctgctcaatcaaatctcctactatcatttcattaaaagcagttttattccggcggggaaaagaaattacggcatgtaccttatttgtgtctgaaatcaaattatgctttctaaaatcctgaatagtagaaactaactgggatttacacttttccttataaactgcaatattcttaggtttgcagtcctttatctcaacaaacataatccagcatccctcattaccggacgaaggaaaaaggcaacattcgcaatgttctatttgcaatcctttttcatccttaaattggcaatcatcaaaaataacatgatcgacagacaatgatgttgcattattcaatgtcagaccatccatttctgtcgtagtttcgggaataaaagggatttttgtgtgtatttccacttttcttacagacatggttcgttccgtaaaatcaatgatataaagtttttctgcttcagtagtagacacttcacacaacgaataaacctcacagattctattcttcatcctcgtaataattaagcaatgacaaatactctgtagaattcattttataagcctggttcaaatagttatcttccaaaatgccatccttatcctgaatgcacatcaaagcgccttcgtgaatctcatagatagaaactaacttaggatcaatccacgcactgctcgaaggatattcctttctcttttcattcggaatattcttttccaccaatttccccatcaaacaattattcaatgcaaaaagtatataaggactatgtgtggtgatcaataatttatgcccttctttcttcaggatttcacgaatgatatagtatgtaaagtcttgttgtatatcagggaataagttctcttcaggctcttctataatcagatcgcaacactgagttttggtaaaatgatcaacagtctgataaaacaaatctttttctcccggtcgaaaaactctgaaatgctcatttacgccctcaccttcatggaaagtttccgaagcagcatctatatccggattcctccttacatttacacggaatctatcacgataaataatttcttttagctcttcgtagatcaccttattatcaaaagacacatgagaatccagttcatctctcaaatcatcattcagaagcgtatggcaaagcaataatagcggaactaccgattgcactccacttgaagaagaaaacaattgaatctgcgttccattatccaaacggatataatctttattacttgatttatcataatagtatttaacccccagagaaaggatattcaagggtctgtcagctgtgaatagttcgcgcatattcccccagtcctccatgaagttcgcagtactggtgtccgacatctttatagtactccactgtggcagcacggaaatgatatttctctcagccggtatataggctattttctccagtttgtacccccatctcgtacttttcagttcaaaatccggagaagttcccaaacctttatataccaccttataaacatccgattcatactccagatatgaatcttcgcggatatatccttccattttatgaaacgaaattaaacgttccacaaatttatcatctttgtattttacgaaggactgttccagagatacgcgtttctccagccacgcacaatagcttacaatcttagcaattgtactttttccactgctttgcggccccatgaagatattgattttattcaaatcaaattccacttcatttatggggccaatatttttaataatcagatgcgccatgccaatataactcttaatgcccttagattttattttctatatctatttgacaaagttatgaaattatccggttatagcagtgagaaaaaagaattaaatattaaagcactcccttcgaactcggcaattcaaagtgatagatatccctcttcaccgccatctttatagcgcgggccagcgctttgaaaatgccttctatcttatggtgctcgttctggccttccgctttgacattcagattcatcttggcggcatcgctcagggatttgaagaaatgcaggaacatttctgtcggcatctcaccaatcttttcacgattgaactctgcatcccataccagccaggggcgtccaccgaagtccaggcaaacctggcaaaggcagtcatccatcgtcagggcatagccataacgctcgatgccacgtttgtttcccaatgcctgatagatgcaatcgcctaatgcaatcgcagtatcttctatggtgtgatgctcatccacttccaaatcgcctttcacatgaatcgtcaggtccagaccgccatgcttgcctatttgctccagcatgtggtcgaagaaacccagtccggtatgaatgtcgcaggcaccgttaccatccagatttagagatacgaaaatatccgtttcctttgttgtgcggcgtacttccgctttccgttctccggcaaaaagaaattcggcaactttatcccaatctttcgtgacaagggcacatacctcttccaaaccttcgcaggcagcagttccaccttctgattccggtttcagtaatgtagtatcatcctgcaaataaatggcccggcaacccagattcttagccagttccacatccgtcggacggtcaccgataacgaaacttccggcaagatcgtactccggattattcagatacttcgtcaacatccctgtgcgcggcttccgggtaagtgccatatcttccggcatactacggtcgatgaagatttcatcaaatgtaatcccttcaccctccagcgtcttcatcatcaggttatgcgcaggccagaaagtttcttccgggaaagatgccgtgcccaaaccatcctgattggtcaccatcgcaaactcaaaatccaatttgctacggatgaagcccaggttacgcatcactttgggataaaactccaacttttccagcgaatccaactggtaatctacgggcggttcaatcaccaaagtcccgtcacggtctataaataatactttcttactcatagcttttcaatgcttctatcagtttatcattctccatccttgttcctaccgtcacacgcaggcagttgccacaaagcgatatagaattacggttgcggacgatgatcccctctcctaccagataattatagattttcaccgcatccgtcacccgtaccaggaagaaattggcatcagacggaaatacttccactgtcaacggcagttcggaaaaacgtttctccaaatcctcgcgttcctctttcaacctcttcacccaacgttctatctcatagtacttatgcaacatctctattgcctgtttctgagtcagttggttcacattataagggtactttatcttactcaggataccgatgatttccgtagaagcaaacgccattcccaggcggatagccgcacagccccatgctttagaaaaagtctggaacacaacaagattcggatatttatctaaatccagcaagaacgacggagattctgaaaagtcactgtacgcctcatccagtatcaccaacccttcaaactcacgcagcaactcctctatctcactgcgcaacagatcgtttcccgtaggattattgggcgagcacaggaaaatcagcttcgtccgttcatccgcagctgccagcaacttgtctgccgagaactggaaatgctcgttgagcaagactttgcgatactccacattattcacatcagcacatacctgatacataccgtaagtgggatcgatagctaccacattgtccactcccggctcacagaaagcacggaagaccaagtcgatagcttcgtcgctaccattgcccaggaaaatatgctcgggagacaccttctttatcttggaaagttccgttttcaattcccactgcatcgggtcgggatagcggttgtgcggcaggttgtacggattctcgttcgcatcgagaaataccgatgccgttacacctttatattcatcacgtgccgaagagtaaggtttcagcttccagatattcggacgggtcagttcttgcaatgttttcatgatctataatatgataaagtattgaacactgattacgcgaattacacaaatttcatctttacccttattcgtgtaatccatataatttgtattctatattgtttttaatctcactgttaccgcatttttatgcgcatccagatgttcgttcgccgccatctcttcaatggcagggccgatattcttcataccttcctgacggatttcctggaacgtaatcttgcggataaaactatccaggctcacaccgctataagctttcgcatatccgttcgtcggcaaggtatgattcgttcccgaagcataatctcccgcactttccggagagagcgatcccaagaaaacggagcccgcattcaccacacgttctgccacctgcatatagtccgcagtttccacaatcaggtgttcgggcgcatattcgttcgtcagttcgatggcctcttccatatctttcaccacaataagtttactgttggcaagagatttctccgcaatttccttacggggcagaagttccaactgacgttccacttcctctttcacagcctgttgcaaagcctctgaagtggtaatcagcattgcctgactatccacaccgtgttctgcctggctcagcaggtccgcagctacaaataccggattcgccgtttcatccgccagcacttccacttccgacggaccggcaggcatatcaatcgccacatcacgcagactgaccaactgtttcgctgccgtcacatactggtttcccggaccgaatatcttgtaaaccttcggcacgctttccgttccgtaagccatcgaagcaatagcctgtacgccacctgccttgaatatccggttcacccctgccacctgtgcagcaaaaagaatagcaggatgcacccgtccttctttatccggcggtgtgcaaagcacaatctccttacaacccgcaatctttgcaggtacagccagcatcagcaccgtagagaacagaggagctgttcctccgggaatatacaatcccaccttttcaatagccaccgccttttgccagcacgtcacgcccggcatggtttccaccttcttgccctcaaagcgctgtgcagcatgaaaagtctctatattctgtttagccagacggatagccgccttcagcttttcatccaccagcgtctccgcttctttcagttccgcctccgtcactgccagcgatgtcagctccgccttatcaaactttgcctccatctccagcaccgcacggtcaccgtccgacttcacgcgatctataatcccccgcaccgtatcgaacagattctcagtattcatcaccggacgtttcagtatctccgcccattgtgatctatccggattatttattaatttcataccctattccatttttaagattcattctacactatcactcctacaccatcacctctgcactatcaccccgaatggtccccggcctcactgtaggagcgtcaaacgcaggtagtatgttcagcgtcaagaagggcaggctgtttgagcgtagcgagttcctgccctttagctgaaaatgctaccggagtagctccggaagtgcagccttgagtttttcttttggtatcttttcttttgtctcaagacaaaagaaaagtacatcacaatatcattttttcaatcggcagcaccaaaatcccttctgcccccagcgacttcagctttcctataatctcccagaagcacttttcatccagcaccgtatgtaccgagcaccagccctcctgtgccaacggcatcaccgtcggactcttcatacccggaagcacctggataatctcttccaactgttccttcggtgcattcatcagcacatacttcttatcttccgccgtcttcacagcatccatacggaaaagcaactctttcaggatttcctttttctcatcgcacagattcctgttaccaatcagcagtgcttccgatttcatcaccacttccacttctctcaaccggttgctcaccaacgtagaccccgaactaacaatatcaaaaatcgcatctgccagtccgatacctggtgccacttctacggaacctgtaatcacatgtatctccgcattcacattctgagttttcaggaatgtactgaggatacccggatacgacgtcgcaatcttccgcccttcaaaccactgtacacccggatattcgatatccttcggaatagccagtgacaaacggcatttgctgaatccgagacgctttacaatttctgcattttcattcttctccacatattcattctcgcctacgatacctatatccgccacgcctgttgccactgactgtggaatatcatcatcacgcaaaaataatacctctacaggaaaattagacgattgtaccagcagtgaacgtttcactgcattcaatttgatatctgactctcccagaaatgacattgtctcgtcataaagacgacctttagcttgtactgcaattcttaataacataatcttatttataattttacaatttaacgactcacaaaaactaaactagacttaactaaactcttgaaaacaaaaaacgaggcttgccactatccggcaagcctcgtcatttatatgtttattcattatgcacatacaatcatacgcctaccgattattcgtcaggtaatgatgatggtgatgatgtgcaacaatatttttcatacaattcttttgttttgatgcgacaaaagtaaactatccgtttgaaacttccaaagatttatcacaaaaagtttcgttttcctatcattttcttagtttacgttacaaattacactgatttgcacagatcaatttattatgggaaagtaatgaactaaatgccaataataattttaggcgcggattacgcggattacacggattaatgactgcgctatcacactatattacaggaaaagaatccgtgtaatccgcgtaatccgcgcctaaaattatattcattaaccgtccatagtaagcaaacttaaatcagcggcagaatctcctccttctccacatcgcagtgatgaaagtgcatttcctgttccgccttctccttcggaaaagtgaagtaagtgcataccgcctccgaacacacctctcccgcctcattataaagtttcgcatcaataatcacgatattccgcttctgctcacgtatggaagcccgcaacacaacatgcgagtctttagtcgacaccggtttacgaaaacgggtttccatcttcgaagtcaccccgcttgtctgcaacttacgcactaccacccatccgcaaatttcatccagcaacaccgactgaatgccaccatgcagcgtattcagccaaccctggtactccggacgcggcttccaaatacttaccacctcgtcgccatcctcgtaaaactccattttcacaccggactcattattgggagcacaaccgaaacaattgtatccttccaaatctttccacgggttaataatcttcttcatacaatttcgtttttatttttaattcaagtttcgcagattctacaaaaagattgtaaatggtacttttttaggcgcggattacacggattacgcgaattttttagttaattgacacaatagcacagctttaaatccgcgcaatccgtgtaatccgcgcctaatatccacactaataatatgtatattcacgctcttcgtacaccaccggcacatcgtctatatacttgattctgattttccagtttccctgattgtcattatggaatttatagacgtatttcacttcttcggtttgcccttccggacgctctgttccggaaatcagttcccctttggtattgtaccgatacgtatgctggctttgagatgtaccatccggtgaaagatattcttcgaacactacacgcccctgaaaattatagcctctccgaacagagccaaccggatcggctccttcgggctgcaacagcactttccgctctatttgctgcccataggaatcatatatataacggaactcactacattttgttccattcgtcaggtaaccggcttcctgtaccatattaccttctatgtcatagcgatacacatcccgctgcataatttcacccttatcatccagtattgaacagtgcttgagacgcccttccttatcatatccataactcttgtttaccgtcagcacattcgccggtgtataatggctttctttcgacaaattcccattctcattatattcatactgaatcttctcccggcatactcccgcttccgtgaaccgttcctcttttattttccgtccgttttcaccaaactcataaacgaagaactgccctttcttctctcccttatccaccgcctgcggacctttggcgatggcaacgtacgacctttgctgtaccttcttcactttaccgcgcacgggtattttctcccagtcatttccaccgcctgcatactctatatccctgcggataatgaaattcggttctccatattcattgcaaccttcaaaacgctctgtccagttacccgcttcatctatcttccgaatcggattcttttgattatcatcttttaccacccgcatcttacctaactgtagtgcaccccttcttttcaaagtcagtgtatccccctttccaatcgggtattctcccacgcgtcccatcttttcatccggcccacccatcaggataatcttctccggcgttccatccgcattgtacagcacttgtctgcccgatgacctcttgttcacatagtctttgaagtacattttcaacatctttcccgcttcatcgtacaaggcagaagtaatctggagtgtatcttcctgcccgttcatataggcaatgcaattcagccgccctttttcatcataggtatagccccaacaatcgctgactcctttatccgcagttgcataaatctcacgcgacacctgtccggcagggttatacacatacaccagtttaccatgcggactgccgtccggcttcagcctgttctctaccatcgcacggcctttgctgtcgtatttcacgaatgtaatgtaatccaccaccttgccggtcacccacgtagtgtccttcagcagcggctcatacaccaccgtacgtatgtttttaatgcccggctgatcctgagcacgaagtgcagccgaaccagctgccaacagaagaagcaaaccaaatattttacatctctcagagataaataggtgtctcatatccaatagtgtttttcaatatgttgccacaaatgtaacaatacttcggcacgcacaaaaaaaggcggggagttttttactcccacgcctccgcttttacttcaaaacaaggacactctttcgtcctttcccaaggatctacaatgccgttgtagtttttatcagggctcagatcccggtgtcccaccacccgcgcctccggataactctgcaacagattggctaccagtcggtgcatcgcctctttctgtcgtaaagtccgcgtatcggcaggacgtccattcacatccagaccgccctcataacacactccaagactattcgcattgtatccacgggcatgcgctccgggcacatcttccgacctcatcaactccacctgtcccgacttccggatataatagtgatacccccacgatgaaaagcccctgtaacgatgcgccgtatccacgtcctgcgcactgaaatcactgtccgcccttgtggcggaacagtgaataataatcagatcaatctttctcataaccgacataccatttatatcgtcatagcatgtgcactcaacgcccccaataaggcagaagccatcgcaataacaactttcaaaacagtgtcccaagtaatcttcttcataacgatcagttttttagtgatttaatgtttagtgattctatcctaacggatcctcttcaagccctccgtcagcgggaccttccggctcaacagcctgcatacttcgcgtcaccacacgtgtgtacgccatcgtcttcgtgatgtccgtcaaccctttgccggggcggaagttgatacgtgacttcttaatcatggatagcgtgaaatcttccgccttttctgcgccctcactactgaggcccatttgtaaagagcctaaatctcccaacctgacgatgcgccccgctttcagggcacgcttcgcctcataaatgatgcccgccagtgcggcacgcacatcagtttccgtacacgtggtacgtccggttatcgcttcacacatttcgtcgaagtccaactcgcccgaggcttgcgccagggcataatactttgcgggctcactcttcttggaaggatttttacgagccaccactgaataattcatggatgttgccatatcaattaaatttttaaagtaaatgtaaatcaccgatttacactgcaaatataccggatgacagatacccctcagtcgccaatgaagctttacgaatattattgaaacaaacacgtctcaaaactttcaccaaccgtttatttttagtaaatttacatcacattaagaatcaataaatacaagaaaatgaaagaagaaaaaagcactttcacagtgcgcagttacacaaaatcggaactggctcatctttacaatccacaactaacccttaaaaacgccacccaagtacttcgccgctggatactccacaacgccgaactgcatgcagaactgattcatttgggttatcaggaccggaaccacattttcacgccccgccaagtaaaagtaatagtcgactacctgggcgaaccttaaacttaactttacgcaaaaagccaaaagttatttcctgttatcggacacatctgttaatttgcaacaaaatagggaaagaaaggaaggaaacgagttgacaagggaacaaggagctgcgcaatgcttctatgccgcatggaaccttgtcacctggtcaacttgttaactcgtcaactttccctcaaaaacatacaaacaatgaagtattcatattatcaaaacaaaaaacaaccgccctgcgccgaagtaaccgacgaagaagtggccaacctcatccgccacgatgaaaaactggcacacatgactcttgacatccgacagcatatcactgccaatgacatcgcaaccgctgattccataaaaggagaacttccctccgtcaccttctccgcccgcttcaccggtggacgccgatacgacaaactcagtgagtacaacggagaaatcgtcctcgacctcgacaagaaatcccccgaagaactggcacgcatctcaaaggcagtcaccggaaatccgcatacccacatcagctttaccagtccgaagggcaacggttacaaactgaccacaatcacctgtctgcccgatggcaccctgccgcaatctcccgaagaagtccgcaactaccatgcgcatgcctacgaccaggttgcttcactctacgaagagctttgccaaacggacatcgacgaatcgggcaaagacatgacgcgcatctgctatctgcctcacgacgagaatgtctatctgaaccctaatccgcaggttctcatcgtcgatctcaaccgccctctcagagaaaagaaaaagaaaactcccggacggaaaaagtcttccggaacaactacagaaaaacctccgtaccaaaagccttcggacaacatctcttatccccaaagcgaaagccgttccttgcttgccctccttctttactatcacgatcacaaaaacaagtacgaagaaggcaaccgcaacaactatctgttccggctaacctgcacatacaatgcttacggcatccccaaagaagaagtcgccccttttctgcgcctcaacttcaccgacataccgcccgaagagattgactccctgacggacagtgcttatcagcatacggacgaatttaacacacgtaagttgagaacctcgcaatggaacttcctccgcatcggacagtatatcaacagccattacgaaacgcgctacaaccagatgaagcaccgcatggaatgtcgcaaaaagggtgaagaggatttcgtcatgctggatgacatggtaagtaacagcatctggatggagctgaacgaagccggttacccttgcagcgtcaagaacatggagaacctgatctactccgatttcagtttctcctaccatcccatccgcgaatatatgaatcatctgcctcaatgggacggcatcgaccacatcggccgccttgccgaaagtgtccacaccatccctgcccagagagagttctggctgaaaggtttcaggcattttctggtaggtatggtagccgccgccacgcaagaagaggtagtgaaccacctttgcctcctgctatgcagcaagcagaacctgggaaaaacgactttcatcaacaaaatcctgtcaaatgacttacgaaccgattatctcagtaccggcatcatctccgccggaaacaaggacgacctctcccgcatggcggaatttatgctcatcaacttcgatgagttcgagggtatgacggggcacgaactcagtctgctgaaggaccttatcacccggaagtttatcagcatccgcctgccttatgcccgtcatactctgaacctgccccactgggcatcctttgccggtacctgcaactacccgcaagtgttgtatgatcctaccggcaaccgccgcttcctctgctatgaaatcgaaaagatagaccgctacgaaatcgactacccacagctctacgcccaaatcaagcatctgctggacaccggctatcgctactggttcgaagccgacgaaaatgatgagatagagcgcaacaacaagcctttcatctttcagactcccgaagaagaaatgctactgacgcacttccgcaaaccggagcgcttcgaaagtttcaagtatatgacggtgagtgaaatagcggaagaaatcagaaacagaaccggctatcaatataaccatgccggaaaaatcctgttagggaagattctcaccaaatatggctttcagtatgttacaagcaagaatatgaggcgctacgaggtaatacttctggaagcggagagtgtgaggaataaccagttgtatcagtaacttgtaacttgtagctaaatcaaaccgtgccaaaacgaacaattctgaaaaataataattatcttcgaagctataaaagaaaaaatgtgtgttttatggaatataatacattgctacgcaagcttcctatcggaatacaaacttttgagaaacttcgcaaagagaactatttgtatgtagataagactgcgcttgtttggcgtattgccaatacaggcaagccttatttcctgagccgcccccgccgcttcggcaagagcctgcttctatccactttcgaggcttacttcgaaggcaaaaaagaactctttgaaggccttgccattgaaaaaatggaaacggaatggaagaaatttcccatactacatctggacttgaatgccaaaaagtatgaaactccagccgacctgatagcaatgctcaaccaaacattggaaaaatgggaaattgtgtacggaaatgaaaaaaaggatcgtagccccgaagaacgctttgcatatgtcatagaacgtgcctatgaacaggcaggttgtggtgtagtggtcttagtggacgagtacgacaaacctctgttgcaagccctcgataatgatgccctacttgaagattatcgcaaaactctaaaagctttttacggtgtactgaaaagtgccgaccgctacctgcgttttgttttccttacgggagtcactaaattctcacaagtcagtgcatttggtgatctgaatcaactgaatgacatcagccttgattattcttatgccacagtatgcggcatcacccggacagagttggttgaaacctttacgtccgagatagaagaattcggtagggtcaacaagctgtctgcagaagaaaccgtagacaaaatggcacgtcaatatgatggctatcactttcatccaaaaggagacggagtctttaatcctttcagtgtgttgaatgctttcagtaaacgggaattaggagattactggtttcagacaggaaccccgacttttctggttgaaatgctccgaaagtcagaatatgaccttcgtatcttacttgacggcatcgaagctccggcttctatgttctctgagtaccgtgtagaagctaataatccgattccgttgatttatcagagtggttatcttactataaaggattacaatgagcgttttcggaattatctgttggaatttccaaacgatgaagttcgttacggtttcatcaattttctggtaccattctatacttcaatgacaaacagcgaccagggtttttatatcggtaaatttgtgcaagagttacgtgcaggcgattacaatgccttcctcacccgcctacaagccttctttgccgatttcccctatcagctgaacgcgaagaccgaacgtcattaccaagtcgttttctatttggttttcaaactgatgggacagttcacccaagtagaagttgaaagtgccacaggacgtgcagatgccgtagtaaaaacccctaaatacatttacgtcttcgaattcaaactgaatggtacagccgaagaagccctgcaacagattgaagacaaaggttacctgattccttatcaggctgacggacgtgaagtgataaaacttggagtagagttcagcgcggaagagcgtaatatcagccgttggctaaatgtgatgtagtaaaattctctctaaaatgcaatatattgcacttttccctattttattcaatgaaaattcttatatttgcgggtaaaaggcaatatattgcaccatgaatttaagtcaaattataaaagatcgccgcttgctattaggattaacccagcaagatctggcagattatacagaattgagcctgcgtataatcaaaagtatagaagcaggtaatggcaatcccacattcagcactctcaataagattgccgaaatattgggattagagattatcatgcaagtaaaggaggtcaataaatgagacaggcagaagtatatacaaacaaatgtatggccggaatcctaacagagaccgatgatggaaaatatatattccgttataacgactcgtacttactggacaaaaaacagacagccatatcattatcatttcctaaaagtcaacaggaatttgtttccgatactcttttccccttcttttataatatgctttcagagggtgcaaacaaaaccattcaatgccaaacgctcaaaatagacgaagatgatgtgtttggtttattattagccactgcacatagtgatactattggagcaataacagtcaagaaaatatgatagaaataaaagtctgtccgggcaacctgactcccggttttgataattacagtccggcttgtttgaggcagttgttcgatgggaaaaaagtcagtcccatcttagacttcaactatgatgcggataaagataatttttcaactgttatcaatcaaatttcggtatcaggtgtacaagagaagctatcagccataatccgtgataataaaattatgcttacccccaaaggagagcaaggacgatatatcataaagccttcacccggctataagcatctgcgttttcgtaaccagattcctgccaatgagcatttgactatgcagatagcacgccaagtatataaaataaagactgcagaaaacggtttgatattctttgcagacggtgaaatggcttatataaccaaacggtttgacttttcagaagacggcaccaaaatcaaacaggaggacttttcgtcattagctcataagactgccataactcatggcaaaaacttcaaatatacaggtagctatgaagatgcagctacattgttacgtacctatgtggcagcatggcagatagagataagcaaatatttctcattgatcctttttaattacctatttgctaatggagatgcgcatttaaagaatttctcacttcaacaatcacaagccggagattatttactttcaccagcttatgatttattgaatacatctattcatgtgcaagatgaagatttcgctctacaaaatggcttactcccggaaagtgaatattcagaaacttatactcgcaccggacatccttgtagaacagattttaccacatttggaaatcgcattggtgtactaactaaaaagttagacttaatcattgaactcttttcacaggaacacccattaatttatgatctgatagatcgttcctttctggatgataaagcaaagcgaatgtataagcgttcatatcaggagcgtttgagtcgttttctcaggaatgacacagaataaagggtcagaaaacaccctatttgcatccgatatgaaacaatctgttaggtagagttaggttagtttcgtaacttcccttatacacttaaatttcagaaagtaattactttctatttttattctttctcacgaaagtttaaaaaagaacctaaccctacctaactgagtttataaaaaactactatgctatattttactttagcattaattccgtaaattcgtgagttcaatcattaatgacacaccaaaaatgactcaagaaatcatttcctcaatttcaaaatgcagtctccctatacgaacgtaaaggcttccagcatttgaagtcacggttaggcaattcaggacataccgccactacaattcatatgataaaagacatataggaataaaagcaaggaaatatcctccggaaagttggcggaaagatcgaaaaaagcggcgaaagatttgaaaaacaccaccatgtttttcaaatctttcgccgcttttttaataacttctttattgtcacacaaaagctgaagcagcatgcgttaacttaccagccacatccttcaatgcattagccaaagtagtcagctcagttggggtaaatgtagctactttcccatgtacagcattcccattaatccgttgatgtaaccatgaggcagatttgccaaagtatcgttttgcaaattctgaaactgaaataaaagggagcaccccttccaactgcttgcgaacttcgatacgctcacgaagttctttactctcatcaataattttatggacatgggcaaagtcctctgcaacagctgcattaaccaactctttttcttcttcaccaagagattcaaagaatgcattcagcttacgttctgcttcatcacgctcggaactacttgattttatccacagttccttcagtctgaaatattccttttttacatccatactataactgtttaaatcaacaatctaactttaatgaagataagcccaccggcagctaccccggtggacaaagataaagaaattattatcaaccacaaaacttctccgataaaaaaatcattatcagagaaaacttaccataatgaactataacacatgcctcctcacccctctatacagcccccttttcctcttcaatatatgaagtacccccaaaacacttacaaaaacaccgattctataatgccacaaccccagcgaagagtttgcaccatcaacgaagcacaccagtaatatccccgaaacaacagccaacagaaaaacaatcgacaatagcaatacagcttttctttttcctttgcatcctaccgttctcagccccttataccaagcccaatgactcttgacatgaataatccccaatatcataaacagcagactggcattcgtgtgaaatatcgcccagatatgccaactctcatgatcgaccccttgtcctgcaatatgcaactcgacgcccgtgtagaatgataaaataaatacaaggagcaacattaaatccgtgaagtaaataaatctgtttctattcatcttttttgtttgcaaagttacagtgcattaataaatagaagaatagactatgtaaggttaagattgtattattcgaggtattttttccggtagagagtgggacttatgccaaccgcctttgtaaacaaccgtgtgaaataggcataatcatctatccccagatgagtggaaatctctcgcacagtcagagaggtatataccaacattcgtttggcatgcaatatgagttcattttgaatgtacccgcttacgctcacgcctgtaacgttcttaatcacctcgttcagatacactgatgagatgtgcaaagattctgcataataagatacatttctgtttatttgctcattagcagaaagtaattctttgaaggccaatgtaatttcaatgtgccttctgtttttggattcatgcccgattatttttcgggcggcatccgttatgatcccgacaacggtacatgccagattctgtaaaaccgttttcgattcatcattttcccgctcgcctatcctgcggagaatcatggcaaacagttgaatcaattcggtgcgttgcgtatcgcttatcttaaatggtatcggcgataaggcatactcggcaagggcctgtttggtgggagcatctataaataccccgtcgatgaataagagaaacgactttgcatcccctttatcaacgatccgatgcacctgatgcggctgggtgcagataacgctccccgccgacaggtcgcaatctttgaaatcaatgccgacacgacaggttccactctccactataccgaatatatagtaactatcccgatgtgtgtaattgatcagccggttcggggaaaaaggagaaacttcctttgcaaatatcccgaaatcggattgctgaactgctttatgtagaggaatatccgccatgcaatgttttttgcaaagttagcaaaaaggcggattactccgccttttctcccttattcttccgacaactcccccgaccgtatccactttacatacgataccagcgactccccgctcataatttttcccgtcgattcattcaccacatccaccaccgcagtcagcgtacggatgatccgtgagtaattgtcctcaccgttgtagcgcagcttcccttgctctatcaacttcacaagcacgcgggtaactgctttcgggttaccgtaatactccacccttgcaggcgtatcatttttctctgtttgcctgatctgtttaatcaaacttttttttatcgacacagaccaacagctcttcaatgagagcatactcgcgagcactggctattttcagtgcatcacgcaattcttcaagttccataattaacaaaatatttgaatttagttccgagccctgaatgggcgaaaataaagaaataaaaataagacacctggttacacccatttcgggcttaaattgaaatatgcgctattcacttcatttttatcctcagataagcacggtcatcaaaagagcaattgcctttttgcactccttttgtactcttatacaaccgcatacacaagggatctttctccagaatatctgcaagataacattccgactcacgcaaggtggaatataaatgaggataaccgtcggaagacaataccacctcctccgcatcgcccacggaaaagatattcacctgtttcatctgtacaggaaatccatcaaacactggaaaagcgaagtgctgtccttctacgggacaattctgcagaagtgcctgtttttgcagaaaaggatagataaactcccgtcccggatcgtgagattccaaatccttcagcgtagccccatccagcaaagcaacttcattgactaccgcacgtgcatttgccatgatagcatcaatctctttctcattagacgaatacagattaccaatgatacactgacaatctcctacctgccatacctcatttcgggcatagctataaatcactccattggccgtgaaacgtttgcccggctctgccttcagttcatcaagcaaattatgctccacataaaaatcatgtattttctctgttatccggctaatggcaccagcagcatcaatatccttcggaaaatcgcgtatagcctccaaagcaagttccatagccaggcgaccggttttctttccgccgtaagtgaaagtagatttagctgtagccccatcaatcaccgctgcaaagtaaggggtaacaatcatgccatcctcattggtccgggaactttgcttgcccttcaggaaacactcctcaaccgtaaaattaggaacggaaggagcttgatattcattttctgactgtaaatatgtccaatcgcgattacaatccattactttcgatttatgtttcaaataatcaatcagatatgccggacggtctgtttgcaatatcgttgcacccagattgtctatcagataaccataacctttatcccggtttgccaacgagcagtcatcatcatgtccaccggcatgcgtattccacaaggtattgtaccaaatatgggatttcccggtcatgatcttcttcacttcgtaaggcaaaaggttggtatcatgggcgaacttaaactcaatagccaccggtttcaaaatccgaagataatcatttaacttctgaatggcatctttgtcatccaaattaacctttggcatgaagattactttatccagatattttccgtaatcacgcttcacatcttctgcgggagcattgcttttcataatcaccagattggtggttcctgtcttttccaacagttcatacacctggtcgaaatagtcaaaagccttgtccaaattgagcatcactttccctttggccgtcagcaatgcttcttctaaagtgggaatcttgtagatggtcttaatatgacacccattccgcaaacgtagtttctttatttcagccaacgtatattcttccggttttccttttccggtggtggttcggtcgagggtattgtcatgtaacagaatcaaatgcccgtctttggtacgggcaaggtccacttccacaatatccactcccatctgaacggcattttctatggcttccagtgagttctcgcaagcattacgccagtcaccacgatgggctgccaccaaaacttttcctgaagtcggattaaataattcttttcgaatctgatctactttatccgccgccacttgggcatgagccggaagtatccacagcaaaagcaataatacatatttcactcgcatatatttctatttttaataattatcctttgggttttacattccacactaaagtagccaacaatgctgaaatcagtgccgcaccaatccaaaaccaattgatgtacgtaaagtcgtaaacatccgctccgttcacaaccgttttctgtccttcaatcagaatcccactcatcacatcctgcaatccggcacctatgtaactggctatccccactactcccaaggcagcccccgaagcattgcgcggagcaatatccacagccatcaagccgcccagaaagcagagaagtaccccgatgctggaaccaaataaaatcatcgccaatatatccaccccgatatgcgtaccgggaacaagaaggaacaggcataaagcagccacattcatcaacccgaaaataagagcgggcgcattgcgtcgtccaccaaacagtttatcagaaatcagcccggaaaatactgtgccgactatgccacataccgaatttatggagatgataaagctggcatccaacgtagaatatcctttttgtgcttccagataaaacactccccaactatttaccgcataacggctgatatacataaaggcactggacaaagccaagatccaaatggcaggcatcaataaaacctgtttttgagctttgttataatcggcagtttcggatgcgctcattttttctctctctttgggctgattcacagccggaagccctttgctttgcggcgtatcatgaaaaaagagccatattatcaatgtgccgatgagccctaccatacctgcaccgaaaaaaccataccgccaacccagaacgctaactacagaggcaacgatgatgaaagtcaaggcttctcctatattatgactggccgaccaaaagccatagaaagaaccgcgctctttatcgctgaaccaacgggaaagccccactacacaggatgccgcccccatagactgaaaccaaccactgactccccaaagaatggcaaacaggaagaaggaatttgtgaatcccaggcagagattgaccagtgcactcactaacaaccccgtagtcatcaggcgatttatattactgcggtcggctatgaatccgtttgcaaacttgcctacagcgtatgtgaagaaaagtacggcaccgataattcccaattctgtttccgagaatataccttcctctactatcggtttcttaactacattcagactgagccgacagacataatacataccgtaacccaacgtagcagcaaggaatgtagaccacttcaaaaacttcatgcgtcttttcgtatcggacaaagactccccgctacagaatttcggacttgaaaccctgtagaaatttattaactgtttcagcatactgtctcttacctgcttattttagttatgaagccccttcttctttaaatattcaataagaagggcaggacggtcggtttgaatcagtttcgctccctgcccgattatccaaccccaactttcatccggctgttgctgctccacggcacggtcgtcatcatgccctccgcataattccggccaaagtgagttgatgaaaattttagcaccactggtacggacttttttaatcagccgttgtatctccggagtgtccttactgaaaacaagttcataggccatcggcttcatgtgagccatataaccatcaatgatgtcctcagcaccctctttatccaatactaccaccggcatgaagatcattttttggagtatatcaccatgctccgctttcactctttcataaggtaaagatgccttcataatgcactgccgggttgtaccgcttttttcaagaatggcgtaggcttcattaaagtagtcatagcctttatctacatttaccatgattttgcctttacacagttgcatcacttcttcaaaagtgggaatagtgtgcgcagtccgatgattcgtcccgtttttcaggcggaatttacgtagctcttccaatgtatagtcctccggttttcctttaccggtggtagtgcgatcaatagttttatcgtgcatcaaaatcaaatgcccgtctttggttttcttcagatcaatctctaccatatccactcccatctcaatgcaattcctgattgcctgcagggagttctcgggagcattgcgccagtcggcacgatgcgacactacaagaaccgagttattaccctcctgcaggagattattacgtatagcaagtgccttgtcctgcgcagagagcgaccatactactgataataaaagcgttacaagcaaaaatcttttcataatgattatttcttcaaattatttaattctgttttcaattcttggatttctttttgttgctgtatggtgtagagtgtaagttcctctatcttctgcaacaggattttattcatatcatgttgagaatatccttcttcggccacttgcttggcagaaggcacatcaggcagatgattattctcggaaataaattcttctacttccggaattgtcttcaatgtataattcttattgaatacaaaatccgaccaagtggatttcggaccgatgccataatcctctgaaagtattcccttggcaacaaacagattgtacttgtttttaagttcctggcgtatctgggcaacgaaagtatcaatgagaccaatataagtatgatcttccgtgtcaaaatacaagcagctattgccattcgttcctaaataaagtccatgttttgaattggtaccaatccaggcatcatcatggtccgtatcttttccaaaatatgttttaattccatctgcttctgcatatatggctccaccgacattcaaggcaaaactcggatttgccacttgccctattgtcatcccattgtctttgatcaatacatgtggggaatcttcatcatccatattcttatttccccaaagtgcgataccgttcgctcctcctattcttagccatttgtctgcagtttcacctttaatagtaggagctccattccgccctattttcatagttatggcttcagagacagaaacagatccattagactttatagaaaagtgaggagtaccggtattcttggcgattccccaaaagctaattcccttatatccggaaatagtcattttattattatcacagtttattcctcctaaatatctatgtgatccatcattgctataaaaattcaacgctgcagatggaatggcatcccaagtaaaagtacgaggaacaaaaagagctactgttccatttgcgcacactctaaaactttcaccttgcggatctcctgcaacgatagaataacaacgttgctccattggggtatccctaccaacccccacccatcgaacaaatcctttctgaccgtgtcgaaaatcataaaagttctcgggttgagtctttaaatccggaagtacctctcccggagcatattgagcacaaactctgtttcctaccaatgatcctaaaagtaatattacaattactaagtatgcttttttcgttttcataatacaataaatttaattgttaacaaaaatctttctattcagttgatagttttccgattctatcgcaactatatatacaccgctcgttggtgccttgatatttttatccaagagtgtcacatcattcaaagacaattgagtaaatagcctcccttgaatatcagtaacccgtatttttacattttccgcttcgggaaaatttatatgaacccggataacttgcgcacttttatcaaagtagatttcttcatataaaggaatcagtttattactttcccttatattctctctagtttgattatttgcgtcagtctgactcacacaccatttttgaaaatcagtgttatctgatacttgttgcaatacactttcacgcgtatcagtcagattcatccctgttgaacaattactgatagtgaatattcgtccttgcgccgtatcacttacaggagaaaaagcccactgctgataatcggattccgctttagataccttagccaaagcataccctgcttctgcacttagaaaagacaaatctgtctgattctgcatgacatagcggaaagtctcatccaaccccacacaatgaaaataccatgtggaggaatagagaggagctccggtccccacattaagtaatgcctcatttcccatactgagttgtgattcagaatgatataatgccgaaacctgctctttggatagtgctgcatcatagactttaaaatcatccattccggcagccggaatgtcatctaccgtaccaatacatatctctgtaatcagattccaatcaggagtaaaggcagaataacattcagtcatcttccctttgggagtacccaaatagaaacgtgtgccttcatcagaataggtaaccgctacaaaataccatccctcaccttctgcaaaattagaatcactccacatccattgctggtctggcaagggcttctgccggccatccttatgataaatatccagcacagccctcattccctttttcttcattccaagcaataattcaccatcactaccttttgtccagaatgcttgggcaatagaatctttagctacatacatccaatatgtcaacgtagcttcctcacgcacctgcccgtcaaccgaagtcacagggatagtaatgtagctattagccttatcaaaggctattgcctttcccttggcaccgaaacgatctgtcagagagtaaacttttccataaatatcggccattttacccgacattatatctccggaattagtgccattcagcggtaaacaacatttcggtaatggtagttcctgaccatataaatgaccggcaagaaacaatgtcattattaatatataattcttcatagaccacctccttttaattatcttcacaaaaatgtgtttgtagcgcatccttcaattccgtatacttaaactcatacatagcaatttcaccgggcatagtaaacgttgtagacggatttggatcacccaatattatataagatgacgaagatcgccctaaataattacccatataattcatctgaggcaaatttataccaaagaagatgggagcatgccacctattatttgtagtcttacgagtatctttggtttctatccacaggaaataggccgtaaaatataaatgcacttcccactgtacatctcctccggcaacagtaaacataggatcatacaaattataatcgtaataatacgctgaattcggagccgtttttcttctgatagttatagtaccctgatgatagtaaatttctaaatgggaatttgcttcttcagaagtactattaaaagataccagtttcaatgggcgagtaaccttactaagatcttgtctcatattaaaaacaagaactaatccatctatcccagctgttataggactaacttcactcattcttaaaacagttctattcgcatctctaacctcccgatggaatatactttttcccaaaggggtagcataactatgcttatcctgagcatatactccggaaggcaataggagaaaaacaagtagtattctccagattctcatcttgtgtcgcagttctttcattggcctgtcatattataaatttggttaactttataccatatatccggtctgtcggaagtcattaccattattttcccgtaaggaacagtcattaaccaataatgatctccacgtcggtcattgacggtatatttcattttccattccacccaacgagtcactgtccccatttgcccaataggttcctcaggataacatccagaacgtagtcctgttttcttatacacataatgaagaaggttcttataactaacaccatcacgagtgaatgattgtaaatacggatccccttcattcagaaagtttgtttcgtaagcaattacctttttccctcctctatttatccagccatctgtaaaatccaaaaagtctttacgttttggttgaatcacaggcataaacagaagtttacataaagtggtttcaggaacataagctgctaactcatcgtatgtatatggagtcttaaatgcaaggtattgtaaagcattcttctcttcagctatccgaatacaagtttgtagacaagtcatccaactctcttttatctttagtttagctgcatccccatgagtagccggatcatactcacaattagctacacattgcccattgacccttctcgctcttacgtctttaatatcaacggtcaaaaccatgtgcttttgcagtaatatatctactagattttcaaagaacaaataagggtacgcactgacatctgtattacgttttctaagaaacaaccctttcaatacgctggaattcatatcaaatagataatcggtcagaggtcctgaataattcgataatctcgacaaactataatcatgtgaaataaccatccttttatctttggtaatcattatgtccgtttccagcacatttgtatacttttgtgcagcttcaaatgctcctgtagaattttccggatagcctgcacctaaattatccccccagaatcctctgtgtgccgcaactagtacatcggctccttgatcaagccgtggcattttcaagcgtttccatattttagttatgggatctgcattgtgtttcaaatcgtaacagtaatggtcaggataaaacaaggcattccctccatcccgatcaacaataccgatacctggtattttcatagtctgtatgcttccctgattttcagtaatttcaattaacaatgtcataccacctgagagataactatgtagttttccatcgtctttctgcctttttctttcaatagcaaaaagggcagtctcaatatctaagctattccatacatccggatagcaggtagccccacttcccaaatccgaacgtttatagttaacgccaactcccgaataagtagttgcagtggaggtcagagttgcctgatataccagagtatttgattccttataatatatcttaacggtcagagcaccacctcctgatatatttcctatgatgccagcttgccagtcggcttgtggagcaaacaactccgataatgaaacagatgcttcgaaagttctgacagtagcaaatgctttttccaatggaatcaggaaaaatacaaagacaaatagtttcaataattcttttaacataaccgattaatttatggagttttcgttttatacatttgatctatttttatccacatatctggtctgtctgtcgtcaacaccattatttttccataaggtatactcataaaaaagtagtagtcacctcgccagtccactctcaaatcctttatcatccagtcagcccagcggtttactatacctttcggtcccattggttcttctggataatttccaggacgcagtcctgtttttgcataaacgtaatgaagtaaattcgtatattccaccccattacgagtgaaagccgagaggtatttatcacctgcaatcctaaaattcgtttgataagcaagcactcgggatcccccattggctatccatgaatcaataaagtcaagataatctttccttgtcggctgaatgacaggcatgaacaacacttgagagagagtatcatttgatacataattcaagaggtccgtatattcatgaggcaatttgaacgctaaatattgtagtgcatttttggaagctgctatctcaatacactttttcataatttccatccagctatcctttattttcttttttgcctcttcaccgtgtgttttaggatcatattcacaattatcaatacaaactccattctttcttctggcaataatttcttttatatctacagtcagcactaactggtatttgataagcgcatcaaccatatcatcaaaagtaagatatttgaaatcagtgacagacatatctcttttcctcaaatgaagattcttcaactgtgacagattcatattaaacaagtagtctcttggagaaccagaatagtctgtcaagcgcattaggctgtaatcatgagatacaatcaattgtttatcttttgttatcattatatcagactccaacacatcagtatacttttttgtatccttgatggcagcaatagaattttctggtactcctgctccgagattatccccccacacaccgcgatgtgcagcaataacgagatcagagcctgcattcatatcaggtgtctttacttttgtccatactttagtaacaaatgaggatgcattcgctaaactataacaaaaatgtttaggatgaaacaaagagttacctccgtatttatcaataatacccactccgggaaatttaaagaattgcatttgtgcatctacctcctctattttcaatgtcaactctaaatctgacgagagaaaactatacggttttattgtttgttgatcataatgtttacgatcaatagcaaacaatgccgttttcaaatcgagactattccatgaagccggatagtaagtagcaccacttcctaagctttctttagcataagattgcccatttcctgcaaactcggcagaagtcttatttagtatgcattgaaaaagtaatgtcccagtattcttatctatgagtttgatatcaattttacctccgctgtttacacttcctttaattcccgttgcataagaagtatgagagtcaaacatcgtattcaaagacaatttaaccggaaattctcttactatggcaaaaatattcagagaagagaacacacacataaataatatataatatctcataggctacagtcttcagtaaataacagtatcaaacaagtacaaaaattcgttatcagtatttcaccttcatcttcttcactttccataattcaattccaaatattctttcaattccaatgggaaatctgtttgtatcacattaccttgcttagcaacaaaactatcaacctgcttaaagccatccgaatttggtgttacgtccgaattaatataaatgtttttaaaagcagaaataccattatcaaaagcctttgcaagaatctcttttgtaaaagcctttgtattaaattgtatcacacataatgaagccccaatagttagataattttcaaggtcttccatgctataaatgactggtaacatagtaatctctttatccattaaaaaaagtccctccgctacatccgtatcataaaccgtaaacatcacttgagacaacattccatgctgtttcaccatatcataaactagcttataattagatatcttcacatcaagatctaagtagatttttcctctggccattaataaaatttctgataataaaggaatccgttctgatgttaaatccaaattatgatataaatagtaagattttaaatccgaatacgccatcttggcaattgtcccttttccattagtagtccggtcaatagaagcatcatgcattagtacgagtttctcatcttttgacatacggacatctagttctattatatcaatttgattttttatagccagttctacagcctttaaagaattctcaggagcctctttccaatagcctcgatgtgcacaaatctgaatatggctcttatcttttaaagaaagaggaatagacagacgttcatttcctgataattcaggaagataaacttcaacatttcccttacacatcacgacatctccatctgcaaatacaacagaagccaatattagataattcccagggaacgcatattggtgtgtaccctcaacagcatctgaaacttccccatctccccatacccagtttactgaacttattttatcaagaggtacattatctatgcttaaagtcaaagttttacctgcttctattctatcaacagataaaattagctgaggttctttcttaaacacctcattttcctctccaccattacaaccacaaacaagaacgcttggtattaatagtaaacaatatattagcatgtaatttctcataattcttccattaaatcattttaattacagatagggtaattccctatctgtaattaatacaattattaataatatccctcattttgttcttcactcatcggtcccacaggattcagacggttaatatggtcggaaggaataggccgtagcttatgataaggttgaatactcttccccttcggattatacttcttcacccaatcagcaagtttttcacaacgtaccaaatcttcccagcggcaagtttcccccaacagttctcgaccacgctcatctaacataaaagatacaaaatcagaagctgccagttgttctttcgtgacttcaatctccttgtatgtactttgggtatcatctttcacaccgccttctacactccaatactggggagcttttttttctccttttgcccaagcagccctctctctaataacattcaagtattttgcagctaattcccagttaccttttcttccagcagcctcggcagcaatcagataggtctcacccaaacgcattcttacccattctcttcccgattctctctgggctacatcggctctatttggagccaagtgtttcaacagggtcggataattctttaaatcgtgtgcttcataaggaaaataagtatatgaataatttgcaatgtactttttaagttccaaagaactggaaccaaatccagtttttaccactgaatagtaaatagcagtatcacctaaagaaaatttactttttccttttagctgtcccttatcaggatcaggagtgaaatacacttcaccattctgcttaagctcagcccatttaggtatcgtcttcgaattatttgcataatatacccattgaaaacttttatagaaacgtgaatcattcttacggtcaaaaagttcaaataatgtcttatcagtaggtcgcaatcttttatatgggcgaccatactcaatatttcgactcataccgggcttattatcatattcagcaagccaaaataaatgtaaccagttaccatccccattaaaaagtgtgttagtagtatattgcacagcaaaaataacttccgaattcccctgattatttatatcccataaatctgagaaattcttttgtaattgatagggactttcattaataaccttttctgagtagtataaggcactatccaaatctgttgtcttttttccgcgatcttccacaaaagcactggcacgagttaaatatactttggataataaatgtgcggcaacataactatttgcttttcctttttttacatcagatactttctctggagtaggcagattttctacaccatagcgcaaatctgaaataattgcgtcatatacttcacctacagaagcacgtttaaatgcagtttgtacctcataactacctttcaaaaccaagggaattcgcccaaactgttgcaccagatcaaaatacataaaagcacgtataaagcgtaattcacctatagattgtattcttttctcttctgttattacaggtgaagtagcaacctcttctaacgcaagattacagtttccgattcctttataattattttgccacaatttgtaaagcaacgagttatcagctgccatttttgccccatattgatcaaaagaatcacgccacgaaccatcactaccttccgtaaacagatcagtacctaattccacatatgcacttgcgtgctcaccacttgcacctaagcgcagataattataggcagaaaccaaagcggcgtcaatgccagcttctgtttcataaagactataatctattttaggggctccatcttcgcttaaccagtcactacaaccagccaatactaataaagtacatattataatgctatattttttcataatcatttccatattttagtttaatcacaatgataaattcaagccaaacatccatgaactatagcttggagaagtatttcctgtagctccctctggatcaatacctgagaagttagtaaaaatcaatggattattagccgtcacataaaatctcaatttatcaatagaccattttgaagtcaatgctttaggcaacgtatacccgagtgttatatttctcaccctcaaaaaacttgcattctcataataagtagtacttatataatcaggtctttccatatctacactaggacgaggatatgcattggtcggattattaggagtccagtaatccaaacggacagaatttgcacgtcccggcttttccatgatagaaatgtcattcttcaacatccctccctgacttccatataagaataaagaaaaatcaaaatctctataacggaatgaattaaccatgctggcaacaaacttcggtctcttggtgccaataatcagtttatcctcttcggttatcttataatctccattatcccacaaacgaatagtaccaggtttaaaattagctccattggcattgaacttttccatttcggccaaatcttccggagtatcctgccatatacctatttttttatagttataatatacatcgatgggttctcctataaaccaaccgctacccggatcgtcaactttcccattatacaattctacaatttcttcccgacctgctgtaaatgtcaaatcggtagtccattcaaagttctttgtcacaacattacgagtattcaatgaaatttcaatacccttattttgagtacgcccaatatttgatacaatgttagagaaaccagagacaacgggaagttgacgctctaaaagcaaatcatatgttttttgtaaatacaggtcaatactaccataaatcctgttcttcaaaaatccaaaatccaatcctaagttatattgttcggttgtttcccaagtcaataatttattcgccatttttttaggagcatatcccaaaacttcatcttttccgttgttatatacataatatacttttgacaaagtaccccgggtctgataaggatccactgatgagtttcctgttttaccatagccgacacgcaatttcaaattatcaagccacttaatgtttttcataaacttttcatcactgatacgccatgccaatgcagcagaaggaaacagtacccatttatgaccatctgccaaacgtgaagacccatcataacgagcagatactgtcagcaaatagcgccccaaataattgtaatttacacgccccataaatgaagccatagtccatttcctatatccacttcctataccatcaataatagagccagcccctaaatcataatatttcaaaacatcagccgatatgtcctcagcgctggcattcaatgattccctcaaatcctgttgtactgactgtaataatgtaactcctaatgaatgctttgttccgaaatctcttttataagtgaaaaaattctcccaagtaaacatcgaatatttggtcatagaacttttagcatatgaactaccaaattgtctttccgtagttgctgccgaataaaactcataatcttgttgagttcgagcgtcaatacccagattagaacggaacgtcaacccttttatcggaaatgttacatccaagaaataactacctaggaaacggcttgttttcaaaggtctgtcaactgcaccatccgcaagattatacagaggattatacatcaattcgtctcctccaatcttttgagtcagtgaaccgtctttttcatacaaactgcccaatggagtaatgcggtacatataattatcagaaatcatattactaccacgctgtttctctgaaaacgagtattgcgtttgaccaccaatctttatatacttatttatagtatgacttaaattcaaccggacagaataacgttgataagactgatcttttacaacaccatccactttattataagtagcagaggccataaagctagttttggctccaccaccacgtatattaagttgatgctctgtcaaaaagccttgtctggtaactgcatcaaaccagtcattagaacgtactttagaaggatcataattaccattttcatcatatcccatcaatacggattctaaaacataagcatcctgactaaacatgggcaacaacatatcctgctccttattgggaacatcagaaagatatttattcttccctgtactatttctgtatgcttcacgagtgtattcagcatattcagcgccattcatcatatccaatttattctgaatagtctgaaatccaacataaccgttatagtctactttcgtttttccttctttaccttgtttagttgtgataataatgaccccatttgccccacgagaaccataaatagcagtagcagaagcatctttaagaatttccatagactcaatatcagcagggcttatttccgacacacctcctgttataggaataccatcaacaacataaagaggaccgttacttgcagttattgaacgctttccacgaacaaagatggaaggctcgctgcccggttcccaactcgtattagaaactacaactccaggagaacgaccttgcagagcttctacaacagatgttacaggaacatctgcaatcttttgtgcatttacagaagaaatagatcctgttaaatcgcgcttcttcaccgtaccgtagccaactacgacaacttcatctaacatttctgtatcttccttcaaagtaatctttgataaagctttatcattagctttaaaaatcaaagtcttgtagccaataaatgaaacggttacttctgagttttccggaacattggctaatgtgtattcaccgtctaaattagtaatagtacctaaagtagtgccctgaacggcaatactggcaccaatcaccgattctcctttatcatcaacaacctttcctgttatagttcttttttttagtgaattaccgctggaaatttgttcttttttggaaatcacaatcatcttattctttagattcacctccaatgatttgtcaaggatggatgacaatgcctctacaacgggagtattttcaaaagtcgcattaacctttttattctcgtttatttcgtctttctgatagataatggatagccctgtttgactctctatttccttcaatacagttttcaatgtttgttccttaaaaactttgctgactgtctgggcatttaccgacaatgaacccaaactgagcaaaaacaaaaggaataagcatagaattgattttcggttgttcatagcttttcttgatttaattagttgttacaaaattgattttattctctgatatatatatcctttcctctgcgttcgacggttatcgggatgatctcctgcaaagcagccatcacctctcctatcgtctcacggtttcttaacgaaatgcggaagcgcttggcacctacctgttccgattccagactgatattgacgtcatactggcgggatagcttcgctatcagctctttcaacgtaatatcctcaaattcaattcgattctccgaccaggctttccattgcttcacatcattacgggtacgtgtgatttttccggtagccatatccaacttcacaaattcaccgggtgtcatctctatccgctgttccccatgatggatttctacaattccttccatcagtgcagtagtgacaactgagtcttcaggataggcggaaacatcgaatttcgttcctttcactactacatcatatccacaggtttgcaccgtgaatttggctttttccttcttcgtgacttcaaaataagcctcaccgctaagtattactttacgattccgctcgttgaacttatccgaatacttcagtacggaaccggcattcagccataccaccgtaccatctgccaaagtcatcttgctcttttctccgtagggagcttcgaatacgaaataatcttcggtagaagataaggaagcaatgttccagatgcccaacgtagccccggcagtaagcaccacgatggcggctacggcagccactctgcgccagaagctgaaataacgacagggcaacatcggcataatagcctcttgcgtacgaaggcggcgttgcagacgttgccattcatgcatggtctgttcgtccccttcattagtaagtttccattctttttcccactggcgaaaccgcagacgattttcttccgcttgctcaatgtagctgaacaagagtttctcttccgtctttgaaatgtgtccttcaaagtagcggatcgccaattcgtgaatgtttgtttctgttttcataaattctctttctataggatgtaacaactaattttaattctacccaaccccggaaaaagaaaaaagcagaaaatttttagttctctgctttttctcctcctggttattctgtttattcgttcataatcacccaagctaaaaccattatatagatgtctaccggatacttatccttgaagtgacgttcaaaaagggcaagggctttagaaatatgtttctccacggctgtagtggatatttgtaatttatcggctatctccctgttcttgagatgtgtgaaccgactcagcaggaagacttcgcggcaacggtcaggcagctgaccgatgacaagtttgatttgctcctgcaattcgtcatagaggagtttattgtctgcatcaaaggtgaagtcggtatagtaaagccgttcttccccgtcaatggatgccaggtattcaatccggtgcttctctacaatggatacgtgtttcaggtagttcaggcatccgttgcgcaccattgcaaacagcaaagaagttatggagaccgatgaaagtaattccctcttctcccagaacttcagaaaacattcctgaataatatcccgaacgatttcttcatcttcaataaagcgaatagcatatccacgcaaacgcggaaagtaatttttaaacagataaacgaaggcttcttcgtttccccgttttatctcctccaataaatagctatcatctgaaaaatcagccatattcttttccatgcttatattttaaggaacaaagattgttagaagttaataattaggttttgcaaacctattaaaattttgttccaatacaaaatgaaaaaaggattgttttttatgcgcttactgattttgaagaattcccaatgattcagcattacctatttatgcctctctcaactcccaatgtcctgatttgttagagccgacacgtttgattaaccctttctcttttaatgctgccataatacgttcaccttgtcgtaaggaaaccgaaagcgattctgcaatctcttttgcagtgattcggttatttatccggataagttctaatacacgttgttcgtttataccgacatttataccgacatttataccgacatcgacacgaggttctaaaccttcatcctctattgatgcctgataattacgaatcgtctgctctaaattgcggatatgttcatcgaacataaagttgtgaaatggttctatatcatcgttttcacgagtagctataagagattcaatatattccgctttatggtctttgttaatattggtaggaatgattccaaactcaaactgcaactgattcatcagcaaacgagacatcctgccattgccatcagcccacggatgaattgttactaaatggaaatgagcgtcgaaactcaacttatagcattcaataacattcgtttttgaaagagcctttcgtcgctgatttatactttcgcaaagttctgccaactttgtaggtacctttgagtaattcatataagagcgtcctccagttccggctgtgacgttcagtaatcgcaaatctccatttgctgacgaaaattcacctaatgcagtttgatatattgttccagtattcttcagaacgatagaagatagtttcttaagcatatcaacagaaatatcactatgactctttacaaaagcaatagattgttcgtatgctgctttcaggtctaagttcattagttgctcagtcatagaacgacctttcgcactgatgccctcatcaaacaaaagttgattctcaatttcagtgacagtagaaccttcaatagctgttgaatgggtaataagagaatacagatagaatttatcctaatctatctgtttgtcaatacccagctccttaaactgggctaacaaggaaaatatcttctgttctcttgtcataaaaatgttttttgatgctgcctttatatggcatagaggcatgcaatgttttttgcaaagttagcaaaaaggcggattactccgccttttctcccttattcttccggcaactctcccgcccgtatccactttacatacgatacctgatctgcctaatcaaacttttttttatcgacaccgaccaacagctcttcaataagagcatactcgcgagcactggctattttcagtgcatcgcgcaatttttcaatcaccaccttctctctcttacataagaacgatgtccataaattataatcaccacaaaacaaataaaaggaagtacaaatgaaacattcacagcaggcataccgaacaaggtttgcatatcaatgatactcgcctgaagcggtggcaacaccgaaccgcccagaatcgccattatcaagcccgcagcaccgaactttgcgtcatcacccaatccttgtaaagctattccgtaaatcgtaggaaacattaatgacatacaggcagatacccccaccagacaatacattcccccgatatcctgaataaagataaccccaattgtaaatccacaagccgcaatagccagaaccttcaacagcagccccggactgagatagcgcaagataaaagtacatataaacctacttgcacaaaagataatcatcgccacaatgttatactgctgcgacaacacttccgccgccttttctcccatcccctgagacatgaataaacgtgtgccatattgtatgacaaacgtccagcacataatctgcgcaccgacataaaagaactgggcgattaccccttccctgtaataactgatagaaaagatacgtttcaatgtcgggaagaagttgatgtcatgagactggtcggcattcttcggcattttcaccatgcgaatcagtatcaacattaccagaatcacaatgccaataatcagatagggagctatcaatacacttaaatcagaatcgcgaaccgcctcgaaatcagcagcagaaagctgactgcgttccatcgtatccattggattcaaacgattctgtataaaattcatcgctacatacattcccagcaatgatcccatcggattgaacgactgagccagattcaaacgacgggtagccgtttcctccgtccccatcgagaggatataaggattactgctggtttcaagaaacgaaagtccgcacgtcaggatgaagtaggctatcagaaacggataatagcttcccgaaagcatagccggaaaaaacagaaatgccccgaaagcatacatacccaatcctaaaagtactcccgccttataagaaaatttgcgtataaacatagctgccggaaaggccatagcgaaatatccgccatagaaagcaacctgtaccaaagcaccatccgtaacgctcatacggaatattttggagaaagctttcaccatcgggttagtgatatcgttggcgaatccccacaaggcaaagcaactcgtgattaatataaacggaatcagatagctcacaccatccttacttattattgaagtcttctttgtgttattcataagataaaagggttcttactcacggtttattacaatgcttttctgtatagttcaagaatgatctccttagaaacttcacgcggattgcccggtgtgcatacatctgcaaaggctgcttccgacaggcgttccaaatcttcttcctcaattcccaactcagataaatgttgcggaatacctacacgtatggcaagcgattttacagcttccacagctgcatgtgctgcttcttcccgactcatgccggaagtatatacattcatggctttggcaatatccacgtatttatcgagtgcagcaggtgcattgaactccatgataacaggtagcagcaaagcattagccaccccgtgaggaatatcaaagatagctcccagcggatgagccattccgtgcaccactcccaaaccgacattagagaatgccattccggcaatgtactgtgccacagccataccattgcgtgcctcggtatttgtaggttcgttgactgctgtttccagatagcgagctatcatttcaatggctttgatctcgaacatatcgctcatttcccaagctcctttggttatcagcccttcgatggcatgtgtcaaagcatccaatccggtggaagcggtcaggcttttaggcaaggtgtacatcaactctgcatccacaatagctatggccggaatatcattcggatcgacgcataccattttcttttcgttaacctcatccgtaatcacgtaattgattgtcacttcggcagcagttccggcagtagtaggcagggcaatgatggaaacggatttctttttcgtatccgccacgccttccaacgaaacaacatcgctgaattccggattattggtaatgattccgatagcttttgcggtgtctattgaagagccgccaccgatagccaggataaagtctgctcccgactcagcaaaggctttcacacctgtttttacattgaacactgtaggattctgcttgatctcactaaatacctcataaggtattccggcagatttaagcacactcagtactttatccgccactccgtatttgataagatctttatcagttgccacaaaggctttatgcaatcccaaacgggttatttcttttggaagcacttcacgcgctcccggtccgaagtatgatacttcgttcaatataaatcgattaatcatgattttcaatattatattattacctataaaaaactattttctgaaagctgccaatttattcctatagtatgtttccacatctttccaatgatagtaaggagcaagtgtactctctaccggaagtttcatttcctgttcattcagcagaactttcaccagaatatcatcgctcccttttttacgataaaaaacgaactggatgttgcaagccatcgggaaaatcttgtaattgcgccagacctcggcaagactgttcaagtcagtagtctgataagcgcaatcccccaactccaacaggcatgcgagaggaagtacacaagactcatggccgaatcgtaatgtaacgttattctcttttttaacgatacaggtatccgcagtattcagaatgttttccaacagattggcttccagataaggcattttcccttttgtaagtggagacgggccataatcgatataccaattcgcattattcagcaaccacatgtcgtaacattcttcttttgtgaaaagggaatagagttcgatatccgtatcgtggttttgcataatgactgcaagttcaaataagtaactcatcagcttatccgcatccactttccacttcacatagtcctgactgttgaaaagagacttcatcaaccgttcaggatgaagatgttccttccggaaagcttctttcacggcaagcacttcatctgtcttacgctgttttctgaaataatcgtcttcattattcatatagtacatatcataatagctggcatcattcttaatctgcaatttagggttcatagattgcagttgcagacattcagccatcatagagaggatgcaacgaataacaacggtagaacgtgcatccactgctgccactccttgaaatacttcggggaagttctcatacattcttttagcaattccccgatgttggcgtgctcccaacggtgtcagttcaccatagcggtcttttgccattcgggcaaggctatcaatcaagtttaaggtcttctttcccaattcagtcagtgtcccatccttttctgcttcgcacaaaattctcaatggttctttatagtcattgggattaacccgataacgggaaccatgccgtgcataatgactcagatagaatggcttatatcctgacggcggcggagttttcttaaagtcaagatcgggataggcataatgatttgctgccgaaagatgaatattctcaaagatttcttctttagcggtctgcgcacttatgccaagtgtcaggcaacagcagaagaataataaaattaatcgtctcataatatcagattattgtgttcaaaataagcccaagctcacaaaaatactattgcaagcttgggcaagtttagatattaaaattattcgctaacgtatggaccaaacttctttactatcgtcaaattagattttctggcatctaatacatatactgcatattttccatccggataaactcttatcacaatatggccttctttagcttttatgccgcgagagaaccaagggccgatcccaattcctgtttgttcatgataatacgtcatgaatacatctctcctctgagttcccacattgccggacaataatcgctgtcccacttcaggaccgggatgatccggactccatgattgtgctactaccactttaggatcgagtacatccagaaagtttcggtttgtagcatcccggttactatgatggttgagcgacatagcagacactttccctaccaacggtgccatcggagtttcaatatcgtaccattccgcatgatcctgatctaccagaccggaattatctcctccggcataatacttgaatttaccatatttcacaacaatagctgtcgacatctgattatcattgaatttgccattctttgccaacaattcttcttttgagaacaaagcggtggtgtttttaccttttccagtccataaaagattgtttgccttaatatttcggatttcaaacccgggataagattttggatcttttttcaatacaaactgtttattcgatccaatatcaaatttttcaaccttcattccatttttgtttttctggaattccagaaatttcaaaagattttggaaagtagccggttctactcctccattgcctgatgtgttagttcgcaggtcaaccggaaaattataatcaggataatctctgtctacataggttttgataggaattacatcccccacttcggttaagccggtaagcctataaccattttcggaagtaccggaaacactgcgcacactaccgtaatgatcggaatggaaatgagtcagcatgaaatagtcaattgacagtttatctcttcccagcacattagtcaaatagtttattatagacgagcctgccgtataactactatttggaaacacctgtggcgcaaacatgggagcatactttgcatcaaacgattcgttatcaaaatctccggcatcaatcatcatgtttgttccatccggcagaataagaaatgcacagcttccccgtccggtattgatgtgatgaatatccagataacctttttcccatttgggaagttgctcttgtgctgccacaaaagcaacacaaaagattacaagcagaaataaaatactttttctcatggtttattaaattaagtttttcatattatttgctcattatagctttagttgaacaattaacttttccatccgttgaacgtatagatatcacatagaattgattagcatgcagtgcattattgaattggctgattgttataacattattgcttccatccacttgccttctaccttcatatacttgctttcccgacaaatccagaattcgtacaataagttctgtaggagatttaaatggataatccaataaaatcatatcattcttacaatctaccatgacttcaggcttatcaaaatcagttgctatttctgtctgctctaagtcaaaagaccgggtagatgcattggatgattgcttttcaaaagcccacaatttattttttcctccggtattattttgtacaacagaagctccatcagcagtagaagcgtttttcactactgcatataattctgaaagctgattcctcaaagtataaacaacgcgcttggttcccgaatccatataagtctctttactgatggtccaataactattaggagtgctgacactgcgttgaacaagaacttcaccaacttctaaacttgcattctttaccgcaagaaatttttgactttttttatttcttaattgcacaaaaccgaatgtagcaggtacaatttcccattctgaattctcgccccctgtaccattctgaacgatttcgacattctccaattctgatgcatctttcaccaccattagtttgaagctattctcattccgtattttataagtgccagccgacaatgggggatcggaataataaactctttccaacatccatatttcattgtcctctgaacctgaccgtttttgaattatatgagccttagctaaagttgaagcatctttaacagccgcataatagtaactcattgaatttcgtatacgatattcatttggtacttcagttggtaaaaattgccaatcagattctccaaataagcgattagttcctaaaagtatatcacttccctcaggatcagccgaataaccagtcatataatattttgagattggattcattatagtatatgcatctctaccatctgcagacggttttatatgccatgtctcaaaactaacatcaacatctaaattagatctgacatcttgaataagtggagctgaaacatcataactcttattttggactgacaaatagagtccactctttttattttttaaacggtacagaccagagtctaactttgtcctttcattcggtagcgatttcgaaaaagaccaatagatactactttcagtcttttctgcttgaattaacaaaaaataatcctgcattgaattcagaaaaacacctaaatattttccactacttttatttcttaatctaaagtatttagtatcaacgaccggatattctaaaatccaaaactcattatcagtacccttttcatcatactgaattatttcaagcccagtaccaatagacgcatttttaaccaccaaaagtttaccagaatgaagattcttaattttacattcattaagcccggtaaatattaacttccattcatcattacctatccctgtagagagttgtattataaatgctccattatctaaagaagcctcattaaccacggcatattttcctgagtttttattccgtattttcacataggcacctttaggatattccgcaatatgcaaaaactctatctgatcatctgtaagttccgcattatagactttaaaatcatccatagctgagtttgccggaaaatgttcaccatatccccccaaatacaaatatttgttggtaggaaagccttgatctcccatccaaatataagaatatgcttttgttaaatcaggcttatacataaccaacctcgtatagtacatgccatgtacaacaaaaatatgataccacccacgctgatcaaattgagctggtttataagcccatagataccaaggaacaattgttccatcgggtttcggaatatatctattaaaccctacagttgcttttttacgtcctaatcctttcaatatacgattctccctatcagtccaattataaaactccatttgagtatctgtgggtttgaaaggtatggcaccggaaggaatctcagaagggtcagtaatacatgcccaaaaagaaacagtatgcactacatttatattataattcgacaaacgcaggcttgaaccttgtcgaaaaaatttcacagccctatcactgttaccaaatcgatcttcccagccttcgacatccctctgtaaatccgcttttcttttctcgacaaactcatattccacattttcaatatctaaatgcaaatcaatactgggattgggtacatttatttgcgaatgaatattaccaagacagacaaacaacaaacaaatagtaaatattatcatattactattcctactcctattacaattagttctcatagcattactagtctaatgaacgttttcctatagttttcaaataatcaaaaagaacttccaatcggtcagaaatgacaatatcaggtgcatgggatgtttttaacaaccaatcccagtcgcaacgacggtcattacctgtcaaatctatattcctaaatttataagcagcaggagaccaattgcctttttcattttccggccattcagggaattgtatgacacgtctattcttaacttttaaccatacaaatacactttgataagtctggccttcaacatttattggttgtgtaagcattttatctgtatctttaaaataaatcatctcaaaaccagtacagccagcatcaataaatgctttcattttatcaaccattttgggatctttttcgtatgcctcattaaaaatagtcggagtaaacattttgattaaaagttcttgatcctctttatttttcactagttgttttattgattctggagtaggataaacctgaattttagttttgaaagtaacctgttcagtcatccctaactcctttaccatataatacatttcaggtattatattctcagccttatcaatacttaccaacactttatccttacattttgaaagcgcttcccttaatgtcgctaatttatattgggttacttctcctgtcgacaatcttaattttacatttttaagctcatcccaagatttataattaacaaaatctccactgattctttttttcacgattccatgtccattcgtcaatctatccaatccccaatcatgcaataaataaagcgtaccatcatctgttgttgttatatcgaattcgaccatatcagcacccaaatctattgcagcttgtatagctggaagagagttttccggataatctttccaataccctctatgcgcggagaccataatataattggggtatttagaaggattgttataaatctcaattaattgagatataggcaaaggttgcgtttgagcaaaacaaaactgcaaagatacctccaataaaaacaataaaatcaatagttttttcatgctgttctttattttaattaatactatttcagacacatcattaatcaactaatagttatcattttgcttcataatatcaggtgcaatatcaatctgattttgaggtattggaaataataactgataaggctctatcacaaaatctccattagaagatttactcatgacctctacagcttttccactccttagaagatcaaaccaacgctgattttcaaaagcaaactcataacgcctctcattccaaatcagatttctaaattcatcctgccctgttatttgctgagaagtatacagctgtaagcctgctctttggcgaacttcattcaaatatttaattgcatccccagaagatgaataactaatttcattaagagcttcagcatacatcaataagacatccgtatatcgcaaaacaacaaaattggcatttgactgattaggtagaactggtttctttacaaatttcttacaatagattctaccatctgctaattgtcctatagatacatcacgccttaaatcatctatattatatgactcatagaaattttgcgtaggttcgttattgccttcagtggctccaatacctccagtaacttctgagcttccaatcggagcaaacaaattagcaaatgcactaccaagatctgtcacagcctcagtatattgtatttcaaaaatactttcagaattatttttattatctacatcgaaaagctctgtatagttttgaataaaagtatattgctggctatcaataacttctttcaatattttcactgcattatcataatcctttaaagtcaaataaacttttcccaaaagagttttcgcagatcctgaaacagcagttcctaaacgtttgttatccggtacttcgggtaaaattttagatgcttcaatcaaatcgtttttaatttgttcatatacatcatttactggacttctgccaattccaaatgtttgaaatggatcatcaaaatagcgaattactaatggtacatcaccccataaacgaaccatattaaagtacgtcaatgcacgtataaacaacatttctcccttatactttttcttggtagtttcatccatctggacactttcaatattatccaaaacaatattacaccgcttaataccttcataacaaccaacccaagtatcctccagaacgcgattataagatgtttcacgaaataaatcaatatcgccataaattcctccactattcgtaaaactttccgtgtaagtattatctgaacgaacttccatcagataaataaaattactaccatactgagatttggccattagggaattataggctgctgctactccctgggctatatctgtttctgttttatagaatgccggtacactttcattagatggaggttcctgattcaaaaagtcatcacatgagtaaaagcatacgctggctaacacacaactgatagagataatatatttaaaagttttcatctcatttctatttaaaagtttacatttataccaaatacaatagatttatttaccggatatccaccataatctatacctggtgtaagaggattagaagacatactgacttccggattatatcctgaatacgatgttatcgtaaatggattatgagcagttacataaaaacgtaaatctccaacattcattttattcaatatttttttaggtaatcgataacctaatgttatattgttaaaacgtagatatgatccatcttcaagcatataattagatgattcatacagtttatctgttggtgaaactaagggacgagcatatttagcagtcaggttattctcagagaaccaattattatacaattttttagcaccagttccccatccttcttcattcaaaagaaaagcatttgacttattaaagatatcaacaccttgaacccattgaatcataaaactcaagtcaaaattcttaaaagaaaatgagttataaaatcccattgtaaaatcaggcatataattgcccattacttttctatccgcatctgttattttaccatcaggtttcccgtcaggcccgctaatatcctcataaatatagctacctacttttgatgtacttaaatgaggatatttattcaaatcttcttctgatttatatatacctataacattataaacatagtaagagccaacttcgccaccaacctttgtcaaactattatcttgaagtatctgtgtttgaccaggtcccaatcgaattactttcgatttattcttggaaaaattcaatgaaggactccacataaaatcatcattgccaatatctgctttaattgataattcaacacctttattattcactttacctatattctgtagtgatgttgtaaatcctgatgcagcaggaaccggaacattcaacaacaaaccatctgtagttgatttgtaatagtccacagcgaatgttagtctattattgaataagccaacatctaagccaacattccactgggttgtcttttcccatgaaatattagggtttggagctgttgaaggagctaacccatttacaaccacattactatacaagtaattagcaggatttaataaggaatatgaactatagttagatatttgaaaattaccagttccgccaacacttgctctcaatttcagatcgctaagtatatccaactttttcatccattcttcttcaataatgcgccatcctatagaaaccgatgggaatgtaccatatttattattttttccaaaacgggaagaaccgtcacgtcgaatagaagcagcaagcaaatatttatttttatatgaataattgactcttgcaaaatatgagaataacgtccaagtacttttatctgtatacccactatttactatacctgcattcagtgtcgtaatattatcattcggaaaatctgaagcaaccatgttcgctctatcataatcttcacgttgtgcactgatacctgccagaaactctatataatgatcatttagttctaaagaataagtaagcgtattctcagtaatccagtttaatgtcgtataaccaaaatatttacctacagccttagatggagctttagaattatagccagccaaataagaaggacggaaataatcattctcaattttattatattgtacaccaaaatgagatttgaattttagattatccaaaatcgttatattcaaattcaaattagatagaatattgaatgtcttctcatcatcttttatactcatagcagtagccaatggactctctaaagccgcagttccccaagcttgtcctttttctatttgatcaccgtatttaatacttccatctaaattatatgccatagcggccggattagctaacattgtcattaaaacgacaccatctgctttatgattactttctgatactttattagttacagaataagaaggtgcaatatcaaaatcaaatgaaacatgtttattcaatttcgcactgatattggaacgtgcagacaaacgcttaaatcctgaattcttaattactccatcttgattagcatagcttattgaagtataataggatatcttttcatttccgccagacactgaaagatcatattgttgtattgctgcagtacgaaataattcatcttgccaatttgtattgactaatcctgcttccttgttcagataaggagcaagataatcaggtattcttgcttttgatggacgaacagaattcggatcttcaggtgtatttactccaggctttaagtctacccaataattatttctggcagcaactacaaaatctgcatattcataagcatccatcaaatcaattttctttgaaactgtttgtatgccataatatgcttttgctgaaattctggccttaccatcttttcctttcttggttgtaattacaataactccgttagcaccacgagaaccatagatagcagaagaagaggcgtcttttaaaacatcaattgattctatatcttctggatttaataagcttgctgtattttcagaagtcattggaaaaccatcgattacaataagaggattagtccctgctgtgatcgaagaagaccctctgattttcattgaggctccagcccccggtgctccactttgttgcatcacttgtactccgggtagctgtcctgctatagcctgttcaaagctacttacaggaatatttgctattttatcttgttttatttgcgctatagctcccgtagtccgcgtctttgactgtgtaccataaccaactacaacaacttcatccaaaacttcattatcttctttcatcacgaccttactgagcattttagtacttgctggaagcgatattgattgataaccaataaatgaaatagtgatttttgaattctccggcacattagctaaagaatactcaccgtttgcattggtgatagtccccaaagtggttccttgtacagccacacttgccccaataatcgtttcacctttctcgtcaacgattgtaccggaaatagttataaggcgaccattcttttgcggagtatctgaaacaggttcttctttcaaatagattttcgtctcgccaatttcgaaaattacatttgtacctttcaataattgagtaagtacatctgaaagttcttctttatcagcttcaatagaaacaacccgatccgggtcaacggtaggacggctgtatgccacggttagtccggtttgttgagtgatagcatcaaagacttttgctaacttaacttgccggaactgcaaggtcactttctgagcattggctgtgaaacatgccataaggctcaaaaacagaacaagtaaaatcttgtgtttcataactttaattttagattaacaatggtataaatcgctttatactaagtagacacacaagatttcggagcgggtgagagaaaaatgctttttttattaaatagattaagaaaagggcttcaaaagactaagaatcgtcattggcggttcaaaatgtagctcgtcatcttgtattaatgtatctatgtataaagggacaatcattcacgagattcgtacaaatttactctttttataataacaaacagccatttttatgcaagaaatttgaagatcatgtaaatagttccacctaaaaaagaacaatatgaaatagaaacttaccgatagaatagtataacagaagagattagcaccataaatgaaaaaacaattcaaaacagaggctgaaacacttgacttcgcctttctgatgtagtatatttgtagaagtttaaaatgaaactctaatataaacctaaaactttagtaaatgggaaaaacaagacctttacaacgaaactttaaacagtgcataaaattgacaatatattcatctaaagcaggagctaatccatataatcaaccgatggtttactcctaagctattcaggttgattatagttaatacgggtgactttcaccccaaacaataacaggtataaaaaagtaaaaaggcgatcattctcatgaagaattatcgccttttttgtatacatatattctattttagttttaagatcgatttctacgctgttaataaacgtcggcaacattcttaaaaaacattcctcttattcttaaaaaacgctgttcacggttattaaatggagtatgcagaatagtcttgaattattacccattttcatattcccgaaattgttcctactttctctttagcggagataaaacagaacatatggattagctcgtcatcatccttccgaccggggacattcgtagccaacattttaaagtttttcaacctatcatcatcaagctgatatattgacataagcacacgcatttttcagattctcgctctccataaacttatttcttcatatttacacttttatacactacaagcagaaggtcatataggccggtaaatagaccaccccttctttcacgctcaagtttttaggatgaatcacatagctccctcctatacgctgatgaaaactctcgttgaagcgggtgagcgagcggatgatatatttatcatttgactttacctctatcggaaaaattttatatttcaatttgctttggttcgaaagaataaagtctatttccacatcgttgcggtgcttctcctcattgtagcgagtgtagaagtagagcttgtgcccggcagccacaagcatctgcgcaattacgttctcatagaacatgccctcgtttacagatagttttcccaacaagatttcccggtaaagttctccatcagaaatttcattctcgtcaaacgtatggctgatgagcagccctgtatcacccatataacacttcacatatgtcctatcttcatttaacgagagccccacgttggggtccgaacaattaaagcattcgttggcaatcatcgaatcggatagccagaagaaggtatcgtgatacttagggaaacttgcacctttttcaatgcgattcatcaccactcgtctttccgagcgcgacaaaaaagccggaatctggtcaaaaatactcaatacactcgacctgtaaccggaatttatcttcattatgtcattgcggtagagtgtcagtatatctcttttttccatatcggccatctcgaaacttcggttgttctccatgtatgccgacaaacttttcggcataccgcccacgatcatatattgccgaaacaacaacatggccttggcgtggagtccttgttccaaaggcactcttttatcgaagcattggcggatatatgtcatcaatggttcctcatccatggcccaggcaaactcctcaaaatccatgggatacatagttagtgccctctcttctgagggaatggttatgtcctttacattttcctttatggagatgagcgaaccagtctctatatagtcgaaccgcccgtccgccaccagatactttatcgcttgccgtgccttaggaaattgttgtatctcatcaaagatgatgacggattcttttgaataaagtttcactccatattccgaagagagaataaggaaaaaggtgtcgaggtcgttcatgtaattattgaaagccgaaacaaccgagtcgctcaccttattgaagtctatcaaaagataactccggtattcattctttgcaaactcttccacaagggtagacttgcctattcgtcgggcaccttctatcagaagtgccttagtacctgctgcctgatgtttccaagcaagtagtttattgtacaatttacgtttaaatatcatgcaattcaatatttatcatatagccaatgcacaaaagtaaggatactttctgtaatgcgcaagtttaataagacgcaaatcacctgcaatgcgcactttactgaacggaattttacctgcaatacgcacttttgtttcacatattgtctacaactcaaatctgcataatcaatgcattagacgggaatcctctttttttcttgtgactatcacttccttttcagcctctttatattcaaaccgtaacggcgcaatcttttccagatcacccagaactttttcgagaagcgtattctctgatgtaatcgtaaagtatacatcccaagctgactggtcttctatcttgaaattcacatcataccagcgattcagcaccttgatgacttcggacaacggagcatccttaaaagctatcacattctttttccacaaggaagacagatgaatatcggcatgtcgggtaatggtacaacgctcactttctttgttatagacaagtttctcaccgggcttcaacggatatttcttatctgaagcaagtgtcagattaacacgaccttcgtccagacagaccgtgatatccttattctccggataggcctgaacatcgaacgaagttcccagaacatgcacggcaggcccgttaagattgacaatgaaaggtcggtgggaattctttgagactacaaaataagcctcgccctccagatagacttcacggctggacagcgcaaatttctttggatacttcaggcgtgaatctgaatttatataagcacgtgtgccatcctgaaacatcatttgcaggcgttcacctttgggcacatagatttcttcgtaaccggaatcacccagcagatcgacacgggtattcacctggacaaacagccctatcagcagcacaaacggaatgagtacggctgtcacacgaaaagtaatcctgcggatacgtttctgccggatgttgcggcggatacgggcaaacatctcttcggacgggatttcgtgattgacatagagttcttcgaatccttgtttgatctgtacggcatcacggtccatacttttagccagacaggccgcaccctcatcagtagcaaaccaagccgctacgatccgggcaacttcaggagtagacgtccctgccagcacttcctgtatctgtttttctgtaggtgtattcatattctctgtactcatactgttaaatagacacttaaataccttaacaaggtgaggtacgtaacaaaaattagcaattttcccagatggacgcgcaatagtttcagcgcatcggaataatgggttttgattgtattgatagagagtttcaggcggtcggctatctcctggttggagagttcttcgcgcaccttcatcaggcagatttcccgcttctggggcggcagcatatcgactgctttataaaagatggacatcagttctttcttttccagactgtcgacaagggtatcttcgtaagcaggggtgccctgagctatctcataattcttggtaagggcggtattctcattgcgtatcacattgagtatatgatttttagtcattgttatcaggtagtttctcaggctgatgcctacccgaagctccgaacggaattcccagaaacgggtaaatacgtgctgcacagcgtcttctgccatcgcagaactcatcaaatagcgataggccaatgcataaagcaatttgtgatatttattgtaaactgcagtaaatgcctctacatctccccgctccactttagcaaaaagtgtttcatcgtcaatatcagatgtttgcggggctttacgctgcatttaaactgtgtttttaaggttaaaaaatagaatgatgcgggcaaatatactcattttggataaaggtggggtatggatgggagctttttattatattttctaaaaagagaatactatatttagtattttacatcaagagacttgcataattagcacatgtaagtctcttttttatgataaaatacgaaaatccactaaaaaagaacagcctaaaagacattaatcttcctcttttcgtatatttgaggagtcaaaataaaaaacatccaaaaaggctacaaaatacagagctatgataaatacactcacctccttacggtttatatttgctttgatggtgtttggagcacattgctatactatagataaattctttgacacccatttcttcaaagaaggatttgtgggtgtcagtttcttttttgtgctaagcggctttatcatagcttacaattatcagaaaaaattcagtgaaaacaagatagccaaacgggctttttgggtagcacgcatcgcacgtatttatcccttgcactggctgactctatttatcgccgtcgccttaggaaactatgtcattgcgtcaggagcaatagattggctcaaacacttcttagcttcactcacattgacaaatgcctacataccaaaagccgactactttttctcattcaacagcccttcatggagtttatgttgcgaacagctattttacctctgcttcccactgctgatacccatagcaaaggattataaaaaaattgctctgcgttttcttagtttctgccatattgattgtgatcggcatgcattttacaccggaaaccgatataaaaggatattggtacgtcaatccgattacccggttaccagattttttagccggcatgctgctgtttcaattgtacgaccgtttgaaaggtaaaaacatcactgcatatcaaggaagtatcacctactactattttgaaaaaccgatgaataaacgaattaaaacattactaaataaataattcatggaacaactaagcaacaagaatcctcgtatcgaggtagtagatgccctacgaggctttgccgtaatggctatccttttggttcacagtcttgaacatttcatttttcccgtttatcccacagattcaccaacttggctaaacatattggatcagggagtattaagcggtgtttttaccctatttgccggaaaatcttacgcaatcttcgctctcctgttcggatttacattttacgttcagagcaataatcagaagaagcaaggcaaggacttcggttatcgtttcctatggcgtttagttctactggctgtatttgcaacattaaacgctgctttctttcctgccggagatgtattattgctatttgtaattgtcgggcttgtcctgttctttacccggaattggagtaataaagctattctcatcacttccattatcttcttgttacaacctgttgaatggtatcattacatagccaatctgatcaatcccgcacatcagctaccggacctgaaggtaggcgaaatgtatgcggaagtggcagagtacacccaagccggcaacttttgggatttcatctgggggaatgttactttaggtcagaaagccagcttattatgggcagtaaatgcaggacgctttttccaaacagccggattattcctcttaggcttctacatcggcagaaagcagcttttcgttacgacggaaaagaatctccatttttggataaagatactgattatctccgcaatctcttttgctcctctctatgccctgaaagagttgattatgcagaacagtgcaatcatacagcaaacagccggaactgcattcgacatgtggcaaaagttagcttttactttcgtactggtagcttcattcatattgctttaccaacgtgaaaagttcagtaaagccgtcagcaacctgagattctatggaaaaatgagtcttacgaactatatatcccagtccataatgggagcactgatttacttccctatcggtctgtatctggctccttattgtggatatacactcagtctgctaatcggattttgcatgttcctgttgcaagtaaaattctgtaaatggtggttgagcaaacataaacaaggtccattagaacatatctggcataaatggacttggatggggacaaataaatagtgtcagctaaggcaatcagaaccggtaaatcaactcccaccccagaatatgcctgtccagatcactctcgtgctgatagcaatagaaaacatctgccgaccaagaggacgacagtttagcttctaccccaccgcgggcacggaagcgggaggcacgaaaccattcatctttgcccagaccgtgatattgctccaaagagacatacggtgaccatgtagttaccttataagcagccttcaggcgggtgcggagacggaattcatccgctccgcgtccgtcgaaagtatgctggaaacgttcgcgcagggtgaacgtccattgtcgttttttgagagtgaaagagacacctgcatgataacggtgccgggatttccagccgtcttcaccacggttgcggtagtgatattcgtaaccaccctcagcttttagaaacggaagaagaagaacggaagtacctacgccgaagccccaacggtctatctcatccagtgcgtcacgggtacgcatctcgacatctccgtaaagttccactttggaggatacatcgtggggcagtagaaatttagtggggattatcgtttcctattctcacccaaaattccgacctttgcctcatggaaacaaatcaattggaggtgttggctcgcatcgtgcttccctctgaaatcctcaactacttttcagttgtcggcgttgaacagacctcaacagaaatacatattcatcttgatgaactgatgaatcctgcattatcccatgatgtacactttgaatccaagggcttcatggaaacagtaagtatcacggactttcccatccgtgaccataaggtcctcctgaagatccgccgtcgtcgctggaccgatacgcgcacaggcaagagtttcagtatccctatcaaccttgatgtcgtttgtaaaggtacccgttattccaaggaatttggtgcttttttaaaagaaacgtatggagacgtcccctgtgacctgccatacgcttgaggaattctaccatatagatggacatactttcgagaaacagtacaaggaaacactcagtggtttcaggaattgggagcagttggagcatgcggatgaatggattttattcccggagaacatcggtccgcatttggctatagatgagtcgtctctgtctaatggagaattatacacttttgtcaccaaccgtgaccggcatacacatgaggaaagccttgtggcagctgtcgcaggcaccaaatcggaggatgtcatacaggtgctcaaacaaataaacgagaaagcccgtgaagctgtggaggaagtgacccttgacctgtccgattccatgcgcaggattgtcaccattgccttccccaaggccaaacgcgtcatagatcgttttcatatacagaaactcgcctgtgatgctgtacaggaaatccgcgtagcccatcgttgggacgccttacagcagagcaatgaagaaatggaggagtgtaaacaagcgggaaagtcatacatgccttaccgattcccaaacggagacacccgcccggaactgctggtcagaagcagatacctcttgtttaaatccgcggaaaagtggacggaaaaacaaaaggaaagggctgaaatactgtttaaggaatatcctgatatacaaatggcttatgggctctcacattcattaaggatgatatttgcaaaaaacaccattaaggacgctgcaaggctaagcatggctcgatggtataataaagtggatgagtcaaggataaaatctttcaatgtcattgcggctacattctacgaacactatgatgatattctaaacttctacaacaacagggcatcaaacgcggcagccgaatctttcaacgccaagattaaactctttagggcaaatttacatggagtggcagacagaaagttttttctttttaggctggcaaagatatatggatatccccactaaatttctactgcccctacatcgtaccgggctttcaccttgttccaggtcacgaaatcgctgtcctgtgcctgcaaagggggcagacagaagacaagcagtcctacacataaaatgacgaatccccgtaatacagaatatttctttagcatattatcctcaaaggtttacttcaacttattttcttagaagatgcaaagctaaagaaagattctgtaataaatctgtaatacgaatgtaatatcaagaaatcacttgattttatcgtattgctgttcggccttgatttccgtatacttgggtgcgtctatcatttccaccaatgccctcagcacaggaccctctcccatcggatcattcttccactggggacgattataatagaatgacaaagcgggcattatgcccgtacctgcacagatagccgttacatcaccctccggagtaatcttggtgaacatgcctttcaacccttcccatgccacatagatatagtcgggatgcagccacccttgtttcacccctctggcaatgccgaagacgaacatggcggttcccgtgatttcttcataggaatcttccttatccagaagctgatgccacaatccgttcgcaccctgataacgaatcagtccgtccgcctgcatacggaagttccggatgacatcttcacgcatcggatggtcggcgggcattcgtgccaacaaatcggcagtagccatgaaaacccatccgtttgccctggaccaatgggcaacgccatgcgctttgttatccgtgtgatagcaatgatagtacagtcctttttcggggcaccacaggtagcgggtatagttcagtatctgattggctgcatcatcaaagtatttagcatcacctgtcgcctctcccatcctgaccagaaaagaaagggccataaaggcatcatcggcccaaatagtattgacatgcggccataaccgggcaatagtgccatcggcaagacgaggttcggacaccatcaggtgatgatcggtctgatcgatatacttctggaaagcctgttccggatgacggcggttgagcacaatcagactggcgcccataggaccattatcatccagacgtttattccggtaaatcatgtgccaattcacatggttcacggctctccaaccttcctgctccaatgtttggttatacaggcgatggaagtagtcctggtttgcatcgtcgaaaatgaaattcatgttcttcagaacatagttctcgtacttcgaagtacctaatttatctcccaactccatcagggctatgttggtgactccgtttgtgtaatgccaatccaggtatttgctttgtactttcacattcttatttaaaggtacatttttgagcgatgtgtaggtcttgccacttttcttatctacaaaatcataggttgttgacttcagaatgcggtcggcaatcatcacagcagtttctctggctttctcattggtctgcgcaatcaatgaagtgctgcacagcagggcgaatgagaagatcaaataagtatatatctttttcatttgtttatcaggaatatgtagttttcaatattagtatatccgttggaagctatcttcatagcgtcggacggatcatttttatcaagtccgtatctatcttcaaaatcatcgggtataccatcattatccgtatccaatagtttggtccccgactttatttcaccggggccttgtgtaggcaggtccatctccgtgagaataattcctcccttcttacccaatgaagttaattcttcaacaagatagctatctacctgatcacgggcgggtaatgaagctccgccatgttgcacaatccattcgtaagcatcccgagcagtcatcaaaccttcgatagcgggatgcacatccgacggtttatccagaaaagtaggagttatcacaacttcagtaccagactcttgtttccgtttcgtacaatcttcacgggtcagttcacgaccgttcagcactccatccttattttcatcataatagttgccggataaatgggcacggaaatgttcattatagcgcgtgaagggagcggtggctcccagcgttttcccatcataattaaaagtagcacctactatgaaatagttattccggatatcggcttcggaagtctgttccgtatcacccatgatataagcaccgccattaccccagttgtaaactacgttatttacaaactgattcagacctttcactttcggattacgggttttattgtcgatatacaggttacggtataaagtcactccgttttcagccgtagtctggataagtcctccacaagaatgtggttgcaggccttgccctataaaggagttctggatagttatattccggggctgatcgcccggtttcttcgggtctccattgatggaaaaacattcatcgcgcccccaagtgaccgacatgtgatcaaaaatcatattcgagccgtaagcgacaccggcggcatctttaccgtctttcccgttcactcccatccgtatgcgcagatagcggcaaatgagattgtcggccccggaaaaagaaacatgatttccataaatgacaattccgtcaccgggagccgtttgtgcagcaatagtcagattcttggaaaaagcaagcggggattgcaggcgaatgattcccgcaacatcaaaaacaacgattcttccgggtttactcaccgcatcacgcaaagagccttttcccgagtcggcaagcgtagtgacgtgatagacctcgccatgtcttccgcctaccgcattgcgcccgtacccttctgctcccggaaaagcaagtacttctccgtaatcagggaaaggaacagacggaccggaaacctcctctttttcatcacaggccaacaggacccatgccagaagaagtattccaattgtagcatatctcattattctaatctcctatttttaatctttctgttttttatcaataagttagtattcggaaaccgttatccagcgcggatcaccatattcctgggtataaaccgtagacccggtattgataatcgtaaagtcaccatccttagcatttctgaaaaatgaagaatccgacatactcaaatctatcaacgtcagtccagtatcggctgcctgctcaaagtctgtggtgcaataattattctttcccgtcaaattgacttgtcccggaaccagagcctttcctgcactatatccaaaaacacaggcattaacagatagtggcaatgcaacagacagtttagagaaattgccaattgccgtatacgacgacttgcttgtagcccaattatagaatgtacaattcgagatagacaccttagcgttagccgaaatcggcacatcggcggtaagcactccaaagacacccggtgagatataaaactcatagaaggtggagttcgttacagaaacatcattccagacgttggaacctttattaatggcatgtatgaatccgaattgcttcgttacatatttggtgtcattgattccggtaaccagacaattatcaatccggatatggttgatggtcgtcattccttcgctggcatcgttcatcatcagaacggtagaaggcaggacaatatcggagttacggatttcaaaacggtctatcgtgatatcagttccggcatcgtgcttgccgatattcaacaagcgtgttttgctaccgccacttcctccggacacgattggctctttgacattcacattctcaacaataaaatagttgatttcaggaatattattcacttccggtttaataatgaagccacctttacgtatatagagtgtagggcgatctccgggattagccaggaatgcaatgcttttcgtcagtttgatgtcaccggtgctactttcgggaagtccgtctgccgacagataataatcaaccccgtttttcaattgaaagatcaaacttgattgactgtcatcattcattccctcttttatcttcgacagtaagtcaacgccatccgtcaccagaacggcaccggaaggcataccggctgttgtgaatttctgccggttgtacttttccgcaccttcgggagctttgctattggtcaatgcaacatagtaggatgtacggggagccaatcctgaaattacatacttgcctgaagctatttccgatccggacaggtcaaagtgcttttcatccgttccattttcctgttgccagatagaaacaccgtccacaggattctggtcagagactctccattctatcacagccgaattctccgttatctggtgttcatccaatgcataaagtaccttgggtataatacgtgtcaaagtggtgataagagaagaatattccgtccagtttgaaatgatatccagactctcattattcgctcttacccgggcataataacctgtttcataacgcaaacctgtaaaagtgcatttaccgttgtttacggtctgcgttgcagcgggttccgactgaaaagtttggtcacgcgaaagctccaccgtataagaggtcgcttctccggatgttctccaggcaagggtaatcgaattaccttccgcaaaacaggaggaggctataaaggaaggtctgaacaggcggggcagctcttccgcctcatccttgcatgaagtaatattcaatagacaaaatgccaatacaggtatcaaatatatcaataactttttcatactctcttttttaatatccataataattcttcaacagtccctgatggcttgacaatgcatcgggaggtataggtaccagatagcggaccggatcggtttccggattcacagttgcggcattcgattcattgatatagccgtaaaaggaaaacaagacagcaggggcaggaacccattgacgcggattcgaggtattcttgacctgcgtgcaatattgattacacatattgataagtgtatatcccgtaggtgcctttgaaggataggattcaaaagcctcatcataagagttcttgcctccttctttataccagtctatggtctgcgatacacatacggcagccggattcacggcatcgaccattttgtaataagcaactgccggataagattcaaaacgttcatcataagtcggttcctcaaatgcagtggtcgtattttcatattgcttggtacgggcaactttacctaacgtaatccaatcaaaatacaagttatagagggtctttccatacagattccaacgcgccagatcatatcttctatgcttttcacccccgaattcccatgcgcgctctttaacgattgcatcaaagaaatcttcttttgaagtaagtttatcaacataggtgtctaccatttccggctgatcttccgccgcgaaagcacggttgcggactttcttcagagcctctttggcttggggtgtaggaccgttatgattctcattggcagcttcggcatacatcagtagcacgtctgcatatcgcatataagtgtaattgattccggtacctttattagaagtactgcccagaggagttgccataaacaggcggttccattttccgcaataaaccgtaagggcggctatcggtttctgaactatattagtcattccagaattttcataacggaacatctcgcacgtaaggtcgcggcgcaagtccttattatcaaacgacagcatataggtaagcgccagtttggaacctcccgaagaatatccatgcggagcattagatgcattctgtccctctgagttcttttgcgaaacgatgtatgtcccccaggaatatcccaactctccggagcctcctacctttgccggtacatcgaagatattatcatcattcaccggaacaatccaactacattcgtccacccaaacctgacggaatgagcgattcagcgaatgtttgccttcattaatcactttacctgcatatttctcggctatctcatagtatttctgccagtcatcattgcgctgcattgaaccgatagcggcagggttcgagtaatccggacgcagagtccatcctcctctatacaatgccatacgggcaatcaatccctggcaaaactctcttgatgccgcttccactcccctgtccgattcttccgcataccacatgaccggttcaacttcaatcaggtcatttatcatgtctgtcaatatgatgtcacggtcagttgcgccgataaacaattcgtccttgtttcctgccggtttccgcctgtaaggaacgtctccccagtttctcaccaactccagatagtacatggcacgcagaactttcgcctcaccataataatgcattaaccgcgaaggcttggttttatcagcagcctcaaacagaggactttgttcgataccttctatcacgtcattcgtcctgttcactccatcatacatccctgtccagatgctgccgtacgaactgatgtcacctgcactcggttcgaaagcactctctttcagattggacgacgtagtgaccgtagtaaactccacatccgtattaaacagcattttctgggccagactgcctacccaacctttgccactgaccatcggcacatacataccattgacagcagtcgcaatctccgattcactggtaaatatataatccttatcaaaagtggaaggtgaatttacattcaggtaatcttcacaagatgtaagtatcatcaatatgataactggaatataaaattttctcatggttcaattctatagtattaaaaaatcaaattcattccaagcgtataaacacgactgcgaggagtcacattattatctatacccggcgtcaaacctttctgtatattcacttccggatcatatccgctatatcccgtcaaagtgaataggttactaccggagaagtacagacgcagactcttgactcccaggcggctcaaccagcgttgcggaaatgtatatcccacagtcagcgtactcagacgcaggaatgaaccgtcttcaatcaaatcgctcattgtgataccctgtgtaacggacatccaggaataagtggcggcattctgatttaatgcggccaatgcaaccggatcactggagacattgacaccggcatcatccacatagcggaaacggcgtgccaaattcatattggtagacagattggaatagttgcgacgaacagccgaattcaaataaagtttattgacgttgaatacatcaaaatcacacatataattaaagaacgcggtaaaatccaagttcttccaactgccggaaaggccaaaaccaccagttacctttggattcgtgtttccaatgaccgtcatatcttcttccgttatcaagtctgagtcggaatcagacagtttcttgaacttcattgctcccggtttaaagctaaagttacctgagctgaatgaagaattatccggaactcccggtttcaaagtccacttcttcgtcgtttcatcaaaattaaaatcgtcaaccgtataaaaaccatcattcacaaaaccatagatgagtcccatacttttacccacttccattttataattgtaggttccataccagttggacaaggaagcttttgttttccattccgtctcaccggaagaaagcttatcgactttgttcttattaaaggccacattgaaactggcagacagattaaagttctttgtctggacgattttaccgttcaatgaaagttcaacccctctattggaagtccggcctacatttgtcatctgtcgcgagtaacctgatgaattaggaataattgacggcaccagcaaatctttagttgtattccagtatacatcgactgtaccggttaaacggtttttgaagataccgaaatccaaaccgagatttcgtgtaatggtagtttcccatctcaaatccggatcatacaaataagtctggtcggcaaactgatagtaattatattcttcattattgaaaccgggagcacttgatccgctatacacacgatagatgttatgccacaaatcatcactgatacggttgttaccagccaacccgtaacttgctctcagtttcagttctgaaataaacctgaccgatttcatccatttctctttggaaagtctccaagctatggaaccggcaggaaacacgccccattgcttaccgggtgcaaacttcgtcgaaccgtctgcacgaaatgtaaaagtggcataataacggcttttgtaatcgtacaagccacggccaaagaaagaggctgttctgtccggagcagctttatagctggtgctctggtgtggagtgcccagtgcaaagttttcaagagccgcttctgccgtaatggaaaccgggaaataacgtgcactcataaaagtattgttattctgcgaatggtttatttcctgtccaagcatcaggtttacattatgaattttacggaacaaattgcgataagtcagtgtatttgccagtcggtacgactctttatgtgttttagtacgcttagccgaaggcatattattcattcccgcagcagacgctgtgctggataaagctccataaaactggtcatcattcgagtccgttgtgctgatgccatattcggagcggaattgcattcctttaaacatatcccacaccaaagctgctttgaggctgattgcagtttcttccctttttctatagttctgcttattttcctccaacggggtgtatctctgatttaaggaattaccatcttcatccagattttcatcatcatcatccggatcaagggatgcgccggaagtcagtccgtttgtgggacggaaacgaagagccgtaacaatgttggttcccgatgtacctgctccgtcaatggtacgggtgcgatatgtggcattcgtctccagtttcaggttcctgaacagttcatggttcagcttcagaataatattgttacgtgacagaccggaacctatcagctgtccttcatctttattacggttataacttagattaaatttcgtcttttcactaccgccgctgatagtcagattatagtattgtgaaatcggattgcctcccagcacttcatcctgccagtcggtagagtccgtatatttgtataagtcaatatcgtcataatagccaaaattcttaataaaagtatcagccgatcctttacgtatcatctggtactcgtactccgccatcacaaattcatagttgttcattaccggtaatttccctgccagtgtacgtgtctgtacatagctattgaattgaaccgaggtcttacccatcttcgggttcttcgtggttacaatgactacaccattcgcacctctggcaccgtaaacagcagtcatagaagcctctttcaagacatcaatagactcgatgtccgtaggcggaataccactcaaatcatcaaccggaaagccgtcgaccaggaataacggtgaattgtcctgagtgattgatcctccaccacgtacacgaatactgatttcagcatccaatgcaccatctgttgtggtgatctgtacacctgccatctttcccgccaaggcatcggccacggaggcagaggctactttagagatagattccgaggaaacagacgcaatagatcccgtcacatcactacggcgaatattgccatatcccaagactacaacctcatccaataattcgctgttttcttttaatgtaatttttgccagttccttactgccggactttagttcaacggtctggtaaccgatataggaaattaagatagtagcaccatcaggaacatcgttcaacgtgtaatttccatcaagattagtggttacaccattagtagtgcctttcaccattacagtagcaccgattaccgactcaccggtttcatctaccactgttccctttatagttcttgttttcgacttcgggacatcattcccgattttttgtttgcctacagatattgtattattatccctattgaaaaacaaattggtttgctccgtaatcttgtccagaacagtctgtaggggactattctttactttgatagatatgcgcggagcagtgttcacaacattttgatcataaaagaatttcaagcctgtctgcttgcccaactgaacaaaaacattctctacagtttcattctgaacgttcaatgttacagttttttccttctgagcttgcgcctgatcaggcatcaatgacaagcatacgaatagtaaaaaagctaaaaacgaatgtatatttctacttttccttttggaattaggaagattattcatttatttgtgcgttttagtaattgataaaattaattagaacaaaggagtaattcgcgatacatgattcacgcgggtcgaaacgaatgaatacctgttcgcattacgagataggggcttctctgtgagacagctcctatttttcttagaggagacgctaagtgggtgctttcatattctatattctcttttaattaaaggttaaacatattaatactcacatatattataatacacatccgtttaccagccggacgtatatccatgcttttttgctacttgaataagaagatatgatttccttcttttctataccggatgccactggtatattccattgattggagcaccgcctccaaacttttattttcatgttctccggaaatcaggttgttgaactcctgtccttccgcaaacgtaatgcgacaattatacatgcgttcaagctctttggccacatcgcgcaccggagtgctgctgaaacgtaatccacctttgcgccatacggcaacatcacgttcttcgcgccgtttgctgtattcaccggaaagtgtattgatcgacacttgttccttagcctgcaaacgcatcatcgcttcaggcagatccacctgtactttgccactctccacatctacagaaacaacttcatccgaagaataagctttcacatcaaagcaagttcccaaaacccttacatcaaaacgggcggtcctgacaataaaaggttgcttttcgtttcgttgaacctggaaataagcttcgccttccagttctatctgccgttcatcttctacaaaactgttcgggtagcgaacacgggaacaggaatttaagatcagctgtgttccatccggtaaccggatttgtctggattcaccataagaggtagaagcttccaaataagaaatctgccgtttatccatataacccagtagattgattcccccgaaaatgagcagtacaacagcagaagcacttgccaccgtcagggctatccgccgaaaccaggtgcgtttcttatgttcgatgcgtttcagtaaccgtctggcttcttccttatatttttcacgctccatgccggtggtgagctcttccatagcggcttctttccagacctctgttgccagttcatccagcattggggcatgaatatcatcttttagtcgggataataatccacgtgcctcttcctgggtgtacatatcatccagataacggcgcattatagatttgtctgttacatcattcttcattgtgcgggctcttttagtataaaggtcatgaaaacttttcttttacatagagtaatacacagtaaaggaaaacatctggggtgtgattaacatttattatgtattaaggcaaatcagcagcaatagcaaatccacatattcactgcctgaatacttaatgagataggtacgaatcaacttaagggaggtagatatatgctcctgaacggtgttgacggagatgcccaacttatctgcaatctctttatgagagagctgggcttcacgactcatctcaaaaatctcacgctggcggggagtcagttgctgcaaggcatgggaaatgagggatttcaaatcattcagcataacttcacgtttggtatcttccgtgtagtccaatgcctgtgaaagaatactctcctttagtttttcctcattagcagcattgcgcaactggttcagtatccggttgcgcataatggtgtagagataggaagaaaaggaagcatcgggattaatgaaacggcggctttgccaaactacagtgaaagcatcctgaaaaacatcttctgcatactcccgcgatttaaggaaacgcattgcaaagtatatcagacggtttttataagtggcatacaattcacaaaaggcgtcctcatccccccctatcaagcggagaatgagtgaacgttcttctgagaaattatctgcacacatatagcaatctttagttttttcgggaaacaaaagtttaatagatgctgcaaacgtatgtaaaatccgggaaataaaaaagggaaaagataaaataagaaaaaagcatagcttacttattctatcaatttattcctgtgaaattcgtttcaggtgttcttctatcttttgaaaaaatgatgccagatgcgaaccatctacaaaggcatgatttacataaatggataaaggaaataccagacgcccctcgcgggttaccgctttaccggaagtcatcaaaggataactgcaaccattgccggcttcggccagcgtataggtggtggcagtgaaatacattttggggacagcgcttaaatgcactacatcataatctccctgttttgccaactcctcttcggcaccataaggattgccatcttcggggatattggttatcaactcatacgcttcggcataaaagcgtttgaaatcttcgtggtaaggaatccgaaccgtataaaaggtctttccgggaacagctatcggagaaatgatatccacttcatcatgaaaaataacttgtccgttcttgtcggtacgataacgaagttccggaacttcattcgccgaacgcactacggcatacagataatagagaaaaaaggaatggcccgaggctctcgctgcggcactggcttcggtacaatcaatctctgtggtaatggaataccaagaatttacaaagccccggaagaaattgtaattatcccggcgctcccatgtctcgatgtctacaatatgtctcataaagttattgattaatcaaaaatgcccggtcgcatgatatcagccgggcattcgttcgtttattttcctttcttatagttttccaatcctgtttgcaggaactcgatatacttaggaatgtcctcgtcatacgaataagatttattcaaaggacgaccttcattatctatcagcacatagaagggctgtgcattggcaccgaatttaacgcgttggagataactccacttatcgcctactgtacgcaatgtacgttcccggccgttttctgtcactttaacaggtgaggtcaatggggttttattatctacataaagtgtaataagtacgtagtcgttgttgataatgtcacttaccttggagtctgtccatacggcaagttccatcttacggcagtttacacaaccatacccggtgaagtcgagcattacgggtttgccatgctgacgggcatattccatacccagatcgtaatcatcgaacttggcatgcacttcattattatagaggttgaagtcctgagtctgcataggcggtgcaaaagcactaaccgccttcaacggagcaccccacaaaccgggaaccatatatacggcaaatgccagtgagaaaagtgccataaagaagcggcccactcccactttcgtatcgtcatcatcatgcgggaacttgatcttacccaacaggtagaagcccaataaagcaaacagaacaatccacaatgccaggaacgtttcacggtcgaggatgcgccagccataagccaggtcggctacagagaggaacttcagagcgaaagccaattccaggaaaccgagggtaacctttatgacattcatccaaccgcctgatttcggcatagacttcagccaggacgggaacagggcgaacagtgtgaacggcaatgccaaagcaatagcaaaaccgagcataccgatagccggagctaccacactacccgttgtagatacctgtaccagcaagaaaccgataataggacctgtacaagagaaagacaccagtgaaagcgtgaatgccatcaggaagatactgagcaaaccgcctgttgcttctgccttgctatctactgcgttgctccatttagaaggtagcgtcagttcgaaagctccaaagaaagaagctgcaaacacaaccaacattagacagaaaaggatattgaacacggcattcgtggaaagtgcattcagtgcactggcaccgaagatcaacgtaatagctaaacctaaagttacgtaaatcaccacgatagaagcgccgtacgtccaggcatcacgaatgcctttctttttatctttagaacgtttcaggaagaagcttacagtcatagggataataggccacacacaaggcgtgaacaatgccagcagtccaccgaggaatccggtgataaagatataaatccatgacatgtcatcctgtgaagtggtttcaccataagattgcagatcattgataacaggtttccacaagtcaatgttgcccgccacatttatatccgtcggaccatctgcaccacctatgatgccagtagaagctgtatccgcaggtgtttcagtttgagaagcaggttgagtttccggtttcgtttcctctaccggagctgttaccttttcagcaggagttgcagctgctgcacctttagcagcttccgctttacctgaaaaattaaattctacctgcgtaggaggcaaacagttttcatcattacaagcaccgaattccagaaaaccttcaatcttataatctcctcctgtgagcttcagcttctgaacaaattgtgccgtagactcaaaatagcgtacgttcatctcgaacaacttatcataagaagctatttcttttcctttcggctgcaactttcctacaactgtagcaccggaaattttctctacattgaaggtagccgagataggaccaccctcacccaggtcggtagaatatacatgccaacccttgtcgatagtagcggtaaatacaatttccgcctctcccgctacaagcgtcttcagttccgacttaaacttgacgggctcctgtatctgcgcttgtgccacgacagcaatcagcaacagacaaatggatagtatttttctcatccttataatctataatttattattaaatctcgtagtcaacacaagcgcgattctcctttacatcagcaatcagcttgcctgctgccacatgctcgggatgagtagcataaaatttcacgtcgtccagcgtatcaaattcgctgtagagggcaatgctccaagtttcgccgggattcatattgagtccaacttctatcttacgtataacagatattttagctggtaaagcctcgatagcggccttgaattctttcattgctgtcagctttttgtcagccggagcttcgtcttttaatttaaataatacaatgtgtttgaccataactttgcaattttaatgatttatctatatatttgtcaaccgaagcgattaatattaaccgcaaaaatactcgttttgttttaaatatacacttaaacggatgttaataataggaattgcaggcggaactggctcgggaaaaaccaccgtcgtacgtaaaatcattgaaagcctgccggcaggtgaagtggtactgttaccgcaagactcttactataaggacagtagccatgtacctgtagaagaacgacagaacatcaactttgaccacccggatgccttcgagtggagtcttttatctaaacatgtagccatgctgcgtgaaggaaaaagcattgaacaacccacctactcgtaccttacttgtacacgagagcccgaaacgattcatatcgagccacgggaagtagtgattattgaagggattcttgccctgtgcgacaagaaactgcgcagcatgatggacctcaaaatctttgtggatgctgatccggacgaacgtctgattcgtgtcatacaacgggatgtagtggagcgtggacgtacggcagaagcggttatggagcggtatacccgtatcttgaagcctatgcatctgcaattcatcgaaccgtgcaaacgatatgcggacctgattatacccgaaggaggaaataatcaggtggcaatcgatattctgacgatgtatataaagaagcatctttgagaattaaaaattgaaaattaaaaattaaatgaggggaactgctaatcttttcctgattgccttgttatgtctgtgctgcctgtcggggtgcggaaataaacggcatggttccatgcccgatgaagctgtgggcgatttgcaacagataaaagatagcggtgaactcgttgtactgacgctatacagttctacttcttacttcaactatcgtggccaggaaatggggttccagtacgagttgagtgaacagtttgccaaaagtctcggggtaaaactgcgcgtagtggtggcaaggaatgtacagggacttataaaaaagttactggcaggcgaaggagacatcattgcctataatgtccccatcacgaaggaattaaaagatagtctgatctattgcggtgaagaggtcatcacacaccaggttattgtgcaacgcgcaggtgggaagacaaaaccgctgacggatgtaacagaactgataggtaaggatgtatatgtaaagcccgggaaatattacgaccgtttggtaaatctggataaagaactcggtggcggcatccatatccacaaagtgactaatgacagtatttcagtggaggacctcatcacacaagtatcccagggaaagattccttatacggtggccgataatgacgtagccagacttaacactacgtattatcccaacctgaatattaaattatccatcagtttcgaccaaagggcttcctgggcggtgcgcaaggatagtccggaactggcagcagccgctaataaatggcatgaagagaatatgacttctcccgcctacactgccagtatgaaaagatattttgagatcagtaaggcaactccacacacttctatcctttctcttcgtgagggaaagatttcacatttcgacgaattattcaaaaagtatgcttcggaaatagactgggactggcgattgcttgcttctctggcatatacggagtcgaactttgatacgacagccgtttcatgggccggtgccaaagggctaatgcaactgatgcctgctacagcacgtgccatgggaatgcccgaaggaaaagaacagaatccggaagaaagcgtgaaggctgccataaaatatatcaatgctaccagtaagagtttctcttcagtaccgaaagaagaacggctcaacttcgtacttgcttcctacaattcgggtatcggccacgtacaggatgcaatggcactggctgagaaatatggaaagaacaagtatgtctggaaagacaatgtagaaaacttcatcttattgaaaagcaatgaagaatacttcaccgaccctgtctgtaaaaacggatacttccgtggaatagagacatataactttgtgagggatattatgggaaggtatgagacgtataagaagaagataaagaagtgaggaagctaaaataagttcagcttattcttctgcgcctcctccaacgaaacagtcttcggtgcttgcgtaacgctcttttcacgcaaccgttgatattctgaacttaatttttcttttaattcttctttggctttcggattcatcaagcgggcggctactgttgcattctgcgaggcatctttcagatgaactacaggagcatgatagacaggagctattttcaatgctgtatgcagttgagaggtagtagcgccacctatcaataaaggaatatcggcacctaccttttccagttccatagccacgtgtaccatttcttccaatgatggggttatcagaccactgagtccaatcatatccaccttttcttccaaggcacgctgaacaatcgtttcggcaggtaccatcacaccaaggtctataatctcataaccattgcaggccatgaccacagaaacgatattcttgcctatatcatgtacatcacctttcaccgtggcaagcaggacttttccggcggtggtggagccttcttgtttttccgcttcaattacaggctgaagaatggcaacggctttcttcatggtacgggctgttttcaccacctggggcaaaaacatttttccggcgccaaagagctcacctacatagttcatacctgacattaaaggaccttcgatgatatccacagctttcggataaagcttcagggcttctgccaagtcttcctccagatagtcaccaattccttttgtcaaagcatgtttcaaacgttcttccacacttgttccattacgccatgaaagaggggcaacttgtttatcagtggcattacctttctgttgttcggcagcagctttcagttgttcagcagtttctatcaggcgttcggcagcatcgggacgacggtttaaaaccacatcctctatacgttccagtatatcggcagggatatcagtataaagtacagccgtagccggatttacgattcccatatccattccttcacggatggcatgataaaggaacaccgcatgcatggcttcacggatataattgttgccgcggaaagagaatgaaaggttgctaacgccaccactgacatgcgcacccggcagattcttacgtatccaaccggtagcccgaatgaagtccacagcataattattatgttcgtccatacccgtagctacggcaaggacattagggtcaaagataatatcatgaggattaaagcccactttctcaaccaaaagctgataagcgcgggcacacacttcaatcttacgttcgtatgtatccgcctgtcctttttcatcaaaagccattactacggtagccgcaccatattgcctgatcgtgcgggcatgttccagaaacttttcttctccctctttcagagagattgaattcacgatggactttccttgcaggcatttcaatccggcaacgattacatcccatttagaggaatcaatcatcacaggaacacgggcaatctcaggctcagaagcaatcagattgaggaaagtagtcatttcagcctgtgcatccagcaggccgtcgtccatatttacatccaccacctgcgccccgtcttctacttgctgacgggcaatgctgagggcttcatcgtatttcttttcattaaccagacgcaggaacttgcgggaaccggccacattacagcgttctcccacattgataaagttcttctcaggagtcacttccaacaattccagaccggaaagccaaagactttcgggtttcggagcaggaacatggggagcagcaccggctatcaaaataggatattcggcgatgtatgcatcggtcgtaccacagcaaccgccaatgatatttatcagaccttcctgaatatactcttccacttcatgcgccatatcggcaggcgtctggtcatattgtcctaggctgttgggcaatcccgcattggggtatgcactgatataataaggagcacgggcagcaagctgttccaggaaaggtttcaactggcgggctccaaaggagcagttcaagcctaccgaaaagatattggcatgctgaactgaggcaaggaaagcctccaaagtctgtcccgacagagtacgtccgcctgtatcggatacggtaacggacagcataacaggaacttgaatgcctgtagcctccatcgccttttccgcagcaaagatagcggctttagcattcaatgtatcgaatatggtttctatcagcagagcatctactccaccttccagcaaggcttccatctgttcccgataggcatcggctagttcatcgtaagtcagcgcacgcatggccggattattcacatcgggactcatggagcaagtcttattggtaggcccgatagagccggctacaaaacgtggtttatcaggtgtagagaattcatctgctacttcacgtgccagtttaacggcagccagattcatctcacgtacatattcctgcacatgataatcggccatactgacactggtagaactaaacgtattggtttcaatgatatcggcacctgccataaggtatttacggtgtatatcctgtatcacatcagggcgtgtcagacaaagcaggtcattgtttcctttcatctgcccggggatgtcagcaaagcgctcccccctgaagtcttcctccgttaagttgtaccgttgtatcatggtgcccatagcaccgtctaaaataaggatgcgctcacgcaccaacttttcaatagaaaccatttgtattcagtgatagaatgatattatctcttaaacatccgcgccatatcgcgtttatcatctttctctttcaacgcttcgcgcttgtcgtattgctttttacctttggcaagagccactaccactttggcaagccctttttcattaataaacatacgaatgggaaccattgtaaaaccggggtcttttgctccacgcgccagtttatcaagttcttttttagtaagtaagagtttgcgctccctgcgtgccgaatggttattatacgaaccgtagaagtattcggaaatatgcatattcttcacccacaactcgccattggcaaagtaacagaaggtatccacaagacttgctttacccatgcggatcgatttaatttccgtacccgtgagcacaatgcccgcggtataagtgtctaccaattcataatcgaatgtagcacgcttattttttatattaacaggagcttgtttcatgatttcaaacgttaattaagcaccatcgtcagcttgttaaatataaactgaatgagcataggacaggcaatcagtaggatggaagaaatgattgtaaaccgtaaccggtctttttcttctactttcatcaacgtggaagccccctcccacaccacatacacaatatagaactgcaacagcaatccgatgatattaaagtccggcaatatgccgataataatctggagcaagaaaagaacaaccagcgcatagcccgcaaactgttgcgtcaatggcatgtcactgtccatcataaacattttaacgcgcatcccatttatgagatacgctgccagaaaatatcctccaaagagggatactgccaccgcgcaacattgcgtcatggcatattgaaaactctcgggaccgccccatcccttcgccagcaaagagccgatgaagacggacaatccacataaaccaatcataggatagacaaaagcagtaaatacttttcgcctatcctcttccaaacgaatttcctcccaagccttggccggagaggaaatcagtaacattgctatatggaataatgctttataatccaaattatttaactgtatattcccacacttgttcagtagctccttccaaagaattcttcgaagtgttaacctgaccaattactttaatcttagtcggcttctgccctgctttaagtccaaacatatttagtgcggaagttaatcgatatgccttgcttgtagaagtatatacattacgtacaaccggatcttcactcgtttcagttattacatgattcaaagtcaagacaaattctgtatctccttgctttacactttccaaatcataagtaagtacaaaagcatgttttgccaattcttctttctgcttttcatcactgctttcctgcttcacccaatacacaggagttacaattatgtattcattatcaaaaacaacaatcggatctatattcacagtaccacttgaaaaagagacattaccggaaaatgcatagaaagctgaatttgcctttgtagattcagaagcacttactggtccttcattaccctttgcatttatagaaaccggctcaatgccattataaagtgtcactgttatagaagctgcatcaggagattgcaattccgaatcaaattggtaatagaaaccataaatttcccccatattaaaagttgttgttgaagaacccgatacaaccaatttctgtccattaaataattggaaagtaggaggataaaaatctgtacacttgccataagcaaatcctgtgactgtagggtcattatcgctattaaagcatgaagttaaagaaacacccattaataaggtaagggcaaccatccagattttaaatttagccattttcattgttctataaatattagagtttgcaaatttagataaaagaattgagtaacactgcactctcctcattttttcattgtttttaagagtaaatgaaatattaatctaaatactgcaccccctgcctcctatttaacatcaattcacaaacaacgtaatatcagagaaaggaaaagtgtagcaaccaaacagtgtacttgtggcgaacatcttcccaacagcagataaatagcaataaagttaaagtaaaacattgttttgccttaacctttttatcactatgccttattctaatctttattttccaattgcgggctgttcagcccacaattggaaaacagatagcccacagatggaaaccaacgggcccacaatttggggatagagttttagtttagacctaaccagattttaaattaagggtgtatacttttagaagtaaaggaaaagagatctttctttagtcatttacggataaatcctaaagaagaaaggggggaaatacgattttgataagaagaaagccctatatttagagataataaggcccaaaaacgctgctttttcacacaaaatacctctattcagcatttatcgaattatcaactgtcagacaagaagataagtcttttttttgtaaatattctacaaaaagtggtgtagacaaacagtttatctacaccactttttcagcttacctacacatgcctccccctcccatcagcaaagggtttcaggcacatggatgtaggtgtgcagacaagattgcccaaaaactctcttgtcagacgattttagcaaacagttccagatgttcatctacataactggctaccatagctgtgattccttcctctttttccaaaaattcttcttccagttcatcgaaagcttcatattgctcgtacatagccatgaattcatcatctgtacgttcccgttccagatcttcgcgatgggcatcataaatctttttagctctatataccagttttccgaaatcttccgctccccacagacgcatcactttagcaaatggattggcaaaaatataaccaccatacccattctgtatcaactgacagaagccaccatccattacttcatcacgaaagatctggtatgcaagtaaagtgtgctgctcacctgtcagtaatggcatggattcagcagttagttcaccacctatcacttctttatatctgtcggtaaatacctgaataaaagtatccattccctcgcctgcggctttgcgcaaggcggcatcagtaatttctatcatagtcttcttattatgcctttttctaattattacgacaaagatatggaattaaaaaataaaggtataacaagaagactaaaaactatgaaaagtgttcctacaatttccgcaggacacctttatcacctaccacaaagtaagtatccttatcaatcaataatgcacggccacgtttctttttctgattttctttattgtctacattgacaccgataaccttgccatcataaaaagtagaaatatccttaaagatggtatgccctacgataatatgtttggcttgatagcgttccatcaccatttgcaggctatcctgtgccattggatgatacttgacatccgtacgcacaaggccacgataccagatgggaccatcattaccatacagaaatgcggtcaatggagaaagagccctgcgttctttcttattcatgaaaagggctttactcatttcttcgttcacggtaggaatgcttaaattacggtcatagaaattcttgcctaacccggcatgaacataaaggtcgctgccaatggtctgcatcgtattacgagttcctaaccatttacccaattccgtatcgggtccaaaaagcttaggataattcatattcaatttctgtgccagcactttatatttatctttcgtatagcgcaagtcattggccaataccaacggctcatgattccctaacaggaaagaaaccgttccacctgcttttgcggcctcatcttccaacttataaaacagccagaatatttgcggtacatcttttccacgatcgaaaatatcaccgataaccatcaggtgattactgccgaagctccaattgtagtttttatcgataaccccattaccctgcaacaagctaataacacaatccaacctgccgtgcggatcggacataacaaacactttctccggttgccgatattgccaatcggggcgtttcaccggatgcaatttcacatcaaatggaaatcggcctttatgatctaccacatgcagagtaaaatcttcgggtagtgcaacataagtcgtgtcggtaattttccctttcttatcaacactgatgacacgcgttttaccatcaggctgataaagcacatacggcccgtcagccgataactcttcttttttctctttgtctttcttcttaccgtctgaaccaaaagttccggcgtttaggccggaactgatgaacattagagtaaatgcgataagaaagtacttcatgaaacttgtcttactcgtcatatatcatttatttaaattatcttccaccatattcaggattctgctccatattaggattggcatccatttccttcttcggaataggaagtacaatcatatagaaattccagtcatacgtcatatacttcgtgtcatgtttggttttactcagattactgtcttttacatccttacgttccactgtcaatccatttctgataacatcatacatgcggtgtccttcggcaaccagttctttacggcgttcgttcagtactctctccaaagttatagtctgtcctaccactgtgttatccggattagcacgcttcacaatcgggtcgagatacttaacagcagcgtcattatcattctccttaacagcggcttcggctgcattcagataagcctcggaaagacggatcaacggaatattggcatcttcaatattctcttcacgctgcggctgatacttatttacataagcataatatttcttatcgaagctcagcaacttaagacgtatatccttcgggtcttccttcaggaactgatagaaagaacaagtgatacacatatcatcgtaaccgtcataagaattgagataacccatactttctttacctggactgtcagtagtgagatttacgatttcgaacaatacttcacccggtttggaggctgaagcatcttctccccaagcagtggggtaatcttcattggtccataaagcgtatttattcttttctgctcctataatagcatcgctcgccattttcaaagcattggcattttcacccttgtagagataaacacgactgagaagtaccattgctccccatttgtttattttgcccttattgaatttttcacccaataaagagagactttgggtaagatcatcgattatctttgtatagcattgagccacagtgttgcgtgtcggcttgctatcaatagtggacagaccttctataataggcacacccagtgatgccccattatctttcagatacggataaccgaagatacgggtcagatcgaacaatgccagaccacggatggccagtgcctctcctttcaaatcatcccgatatgccttgtcgtcttcatcaatcaccagtttatcaatgttcatcaaaatcagattacaattctggatgatagaataaagataagaccaatgactggaagggttatcatccttagtaaagttaaaacggtaatagttagctacacgcttagtagagctaacagcctgcatatcatcacccgtcacatctccataatataccaggcgtccggagtaggcatccgaactctgcatcgtactgtaaatgccattcagagtgaactcaacatccgacaatatcttaatgctggtttcagtatctaccgaagtggaaggttccaaatccaaccaactgttgccgcaagaagtagcgacgaacaacatggaactgataaataaatattttaatggtttcataatatctcgtttttatcgggttagaaatttacatttataccaaaagttacagtcttcaaaggaggagtcccccaaatggcagtaccaccactcactgcttccggatcgtaatagtcatatgccgcccatgtccagagattattggccgatgcatacaaacgtacattctcgataccgattttccgtgtccagtccttcggaacggtgaaaccgaatgttagcgttttcaaacggataaaatcagtgctgtgcagacggcgggtagtcgttactttattcattgctacagagggtttctcgtagaataactcatattttgtaatatctcccggcttcttccaactatctttatagtaggacggaatattagcttccaggtcattaccgccatgttcggttttctgtgcccagttgtcataagagtaaccaccaaactggtaagagaacataaagttcagatcgaaccatttatagcgcaacgtatttgataaaccaccgatagcattgggctctgcatgtttatcaagcacaatggcatgagctttattgatttcttcggtgatgtctttaatgtagtttccattttcgtccacatcgtttgtatagaactggggagcaccggtttccggattgatacctgcaaattcaatcatatagaaagtacggtatgattttcctactttacgaatttgagaaccgctcttgatttccgtctgcatgccatccagggttacaattttattcttgttatgcgaaatattgaatgttgtattccatgagaaatccttagtctggatgttggttgagctgatttccagttccacacctttattctttacttcaccgatattcatcaggtaactgctgaaaccggtagtcatagagataggacggtccatcaacagattcttggtggtacgggtgtaatactccaaagtaacattaatacggttccaaagtgcgaagtccaaacccagattcaggttatagtttgtctcccactgcaagtcgtcattccggagttgagactgaatgatgcccggttgttccagataaccgttagtcagactgctcaatcccatatatccgaagtaatcggaaggaagggtaccattcacaccataagacgcgcgaatctttaaatcagtcaaccaatccttagttggagacatgaatttttcctcaataatacgccaagcaccggatattgaccagaaactaccccaacggttatctctttggaaacgagaactgccatccgtacggaagctaccacccaaatagtatttattcttataatcataattcaaacgagtcaggtaagaaaccatacgtgtacgggtatcattaccaccaaccgattccgtcttcataccattactgatttgatttttatcgtgagttgcaaagttagtggcatatcctgacagataatcgcggtattgatcgtctatttcgtaacctaccagcgcatcaatgtgatgatctctggcaatcgaagttttatagctcacctgattggcccataccattttgttgtattcataatacttcttgctcataccaccgttgatatcatcgccgttggaagtacgcgggtcactccagtctttacctttcgtaattacatagtcatagctgaatgtagacttaaacttcaggtccttgataaattcatattcaccatagatggtattgaatgtacgggtcacgtattcgcgttgataatcgtaagttgccgacaacaacgggttacggtcaccaatacgaatcaagtcacgattccagctaccgtcttcattgtatataggatcagaaggtactacagcattgcgtgaagtgtagaaaggggaagaataagaagttccttcactatatacatcctggttaaccgtagcaaacaagacattggctcccaatttcaacttgctggtagcttggaaatccacattcaggcgtccgctgatacgttccaggcctgagttgatggcaataccgtcttgcttcagataagaaagtgaagagtaatacttgaaccggtccgttcctcctgaaagagaagcttcataagactgatgattgcctttcttaaacagaacatcatcccaatccgtatatccgcaccagggaaccggagcatagtcatcaatttctccatcggcataagccattgcatcggcttcactcttacccttctttatctgcccggctaccaaaccatcatagatatactggcgacgctcttctccacccataatcggacgataatccatagcaaaatcagaactaccccaatcggccttcaatgaaatggaaggctttcctgctttacctttcttcgttgtgatcagtacaacgccatttgcagcacgcgaaccgtaaagtgaagcggcggcagcatcttttatcaccgtaacactttcaatatcggagctattaatggtagacataatatcaaggccggcatccgaactcattgtattgatggtacctgagcgcattggcactccatctattacataaagaggtgagttactggcattaaaagaacccataccacggattctcaaagaagaagacgcccccggctgaccggaagaagaagtgaactgtacgcccggagcattaccttgaagcaggtctttaaaagaaattgccggaacatctttcaaagtctctccttttacactggcagcagaaccggcataagcagatttcttgaaggtaccataacctgtaatgacgacctcatccatcaggttattatccggtgtcatctccactttaatcgtctttgcagaagtaaccttgatttcctggcgggtataaccaatataagaaaccatcaaagtgacaggaagatgatctacatcaagggtaaaatgaccgtctaaatcagtagtacaaccgttagtagtgcctttcactattacattggcaccaataatggcttcaccagtttcgtctacaacagtaccattcagctttgtcttttgctgtggtgctgccatttcttcaaccttagaaacaggtttgatggcaatgacaccatcatgaaccgtataagtcaacccactacctttcaggcatttatccagcacattagcaatcttttcatggttcacaatcaacttttctacttttacatttttcacctcttcagtgctatacacaaaggtgaaatctgtttgtctctgaacttcccacagcacttcgctaagagtggcattcttaaaggttgctgtgacagtggtttgcgcaaacactgcattggcagcctgcataaaaccggtaactgtgaaacagaaaaacagcaacgttatccataaacgtctactgcttctttcagcttgattcttgtgtcctttcttgttcatagtaatcatttttgggttaattatggaatgttattgtattaccttcaattttcacatgcacttcttccgtcttttccagcaacttgacgaaaggagttatttcttcataacgattcaggttacaaccgaaacgtatattcttgagcttttcattttcgtaaactacattcatgtcataccagcgggatagtatcttcataatgtcttccagacgctgatctttgaaattgatctttccttttacccatgaagtatagaacgaagtatccaccgttcgcacttggatggaattgccacccgaaacgatggtggcctgttgcgacggtttcagaataaggctttcacccttttcggcactgaccctcaccgaaccgttgaccaaagttgtctgatattcttcattgggataagcggagatattgaaggttgtgcccaatacttcaacttgcataccattgacgtttacaataaagggctgcccggttttactcacttcaaaataggcttcaccttgcagttctacttctcttttacccgtagtaaaagcaaccggaaaacggaggctgctcattgagttcaaatgaacctttgtcccgtcactcagcaccaacgcatactcaccgccacgtggaatttccaccttattatatataggtttcggccgggcagatgtgctctgtgccaaccgatagtttaaagtggtcgaatctacctgaatatgcgtaccttctatcttccgcaaagcatccgctgtttctttattcaaattgattgtttccccattgtccaaagtcaatatagctttggcagcccccggcaatatgggctgggtaatcagcacggacttatcagaagaatggtcataatcagtatacttcagcgtaatgcctacaaaaaagacggggactaaaacagcagcggcataacggagtattttcatcatccgttcccggttattgcttttcctaatacgcttttgtacttccagccagccggttgcgacatcaaatgacacacctttctccacatgttttttaagattctctttactgcatattttctggaagagggcttcgtgggcagaatcttcctttcgccaactctccaattgaacgctctcttcatgagtgatttcaccggataagtgcctggctataatattagctatataaaaatcctgttttatcataaattgaacttttttcgttgtcttttataataaaacaggagtaattaaaatcatggtgaatcaaaaagcactttttttttaataaaccggaatttagcttatttttgccgcttaaactcaatacataaattttatgccgatattcttcattattcttattaccgtataccttggcggaaatacctatatattttacaggggtatgcaagcgttatccggtcttccctgtggaattaaaatttcattggccgtattgttctggctcgcgactttatccatcgtaggaactatgctaacccgcaatataaaaatgccggttttcttatcccataccatgtatgaagtagggaccggttggctgatcttcactctatacatggttttgttcctgctcgcgtttgatctgctgagactctgccgtgtccccttcaactacggtttcatcctctctctaatattcacggtcgtcttattaggatatggatactataattaccgtcatcctaagacaaatacaatcaacatcgccctcgacaaacctttagccggtgacgccaaaccagttaagatagttgccgtaagtgatctgcatttgggtaatggaaccgggaaaacagccttgaaacggtatgtgaaaatgattaatgaacaaaatcccgatttgatcttgatcgcaggagatttaattgataacagcgtagtacctctttacactgaaaagatgatggaggaactgtcggaattaaaagctccgctgggtgtttatatggttcccggcaatcacgaatatatcagtggcattaaagcaagcgcccgattcatacaagatacacccatacagttgctgcgcgattcagtagtcacgcttcccaacggcatacagctgataggacgcgatgaccggtcgaacacggcccgccgctccttgcaagagttgatgacagggatagataaaagtaaacccatcatcttgttggatcatcagccatataaactgaccgaaagcgaggcagccggtgtagatttacagttcagcggacacacacaccgtggacaagtatggcccatgaattgggtgacagactacatctatgaacaaagccatggctatcggcaatggggaaacagccacatatacgtctccagcggattatctctttggggaccgcctttcagaataggaacggaaagtgatatggctgtattccatttatcgacgaaaaaataaaagcttctcataacccgaaccgtatctgctccgtatcatctccgcatctatacgaacggacttagtacggacttgatacggagatgacacggagatggcatggagatagtacggagatactacggaccagttgtagaaagaaacctgaaacgatgtttatttttaaccggccgcttacaaatagaagagaataaggaaatagtaatagtctttcagatatatacgaagctttttataggcaatcttcttaagagtatgtaccgtttcaacggatacatttaggtactcagctatttctccattcttttttccttccacggccaatcgcatgatagcccgcatctgatcgggaagcttatcaatggcatccgtcagcatccgacaagtctcttcttcgactactgcatcatggaaaaaagaatctttccttttctcaattactttctgagcatattcaaataccactttagaatgttccagttcattgagagccttattacgtacggcagtataaaggaaagatttgacctgatgcaaatagaaaaaatcttctctgatctgccacaacttagcaaaagaatcctgcacgatatccgcagagacttcctcattctctgtatattggtttgcaaacaaacaaagcgccacataatatttatcaaaaacattatggaactcccgttcatcaagcctaatactaataaatgtataagaagtttctgtaaccaccagctttttattttctctattctaatgcgaaaataggaaaaatttattaaaaaatgacacagtaagacctaaacttccacatagaaaaagaatttatcgacattcattgctcagaaaacgcatacttttgtcccatcagaatataaatcataaaaccatgaaaagaaactacgcatttctatttatcattcttttatgtgcagtctttgcacaagcccaaacaactcccgcctttcccggcgccgagggatttgcccgttacaccactaccggaggacgcggcggagatgtttatcacgtcacaaacctaaatgatagtggaagcggctcactacgcgaaggactcaaaaaaggtaaccgcacgattgtgttcgatgtatccggcactatcagcctgctcagtacccttgaaattaagaatgctaatatcactattgccggacaaacagcacccggtgatggcatctgtctgaagaattattcagtggctgtgaaggccgataatgttatcatccgttttatccgctgccgcatgggcgacgagaaaaagacggaagatgatgctttgtggggacgtaaccatcagaacatcattatcgaccattgcacgatgagctggagtaccgacgaatgttcttccttctatgacaacaagaattttaccatgcaatggtgtattctcagcgaaagtcttaccaactccgtacatggtaaaggcggccatggttatggtggtatctggggtggcgaaggtgccagtttccaccataatttattggcacatcatagcagccggactccccgtctttgtggtagccgctacaccggtactcccgatgcggaactggttgacctgagaaataatgtattctataattgggggcctaccaatagtggttatgccggagagggtggcagctataactttattaataactactataagcccggtccttccacttctaccaaagaccagcttgtgaaccgtattttccaaccgaatgcagacgacggtacacaaaagaataccaaaggtgtctggggaatattctatatagatggcaattattttgataatacctgtcctcagatacaaaaccacaaaaagaaagataagttgcttggtttgatagccgatgccaacgctgataactgggaaggcattcatcccaataccaaaaatgcagacttaccggacgggagtaaagaaagtatcaaaagtaacgtcgagttcactgtatcacccgtaagtacccatgcagccccccaagcatatgaaaaagtactggcttacgcaggtgccagcctgaaacgggatgccatagaccagcgtattgtttctgaaaccaaacaggggaattatacctacgaaggaagcaacggcagcagcaacggattaattgactcgcaagccgataccgaaggatatctcttatatagcagcgaagaaaagccaactgattctaataatgacggcattcctgatatctgggctgctcaatatcttcccgtcggaaaaagctatcgggatatagaaccgacaaccggatactcttatctggagctttacatcaatagcctcgtagatcatttgatgaaggcttgctatgaaaatagtaataactccccaagtagcaatgatttcaatttatatggtactactactggcatctcttttccctcctccaatgcaacggatgcagtgaaatgtatccgacaagaaaaacgaattgtccttaaaggactctccgccggagcacgtatcgacatttatgatttatcgggacgaattataacctcacatcaaagtcttgacgaacaggccgaatacgctcttactgaacctgccgtcatcaaggtttattccggagggaaaaagtacagtttcaaaagtccccgttaattttattgtaatgtggagattgcaatacacagaatcactgtctcttattatttatttttataaaaaaagtcagataactcgatttgcataaataaagaaaaggagtaactttgcgagcaattttagaaagtggattacgttttttaatttatataacttaaaaaaagagctaattatgacttattcacacgaagtggaacacatgtgtgttgtaaagaagggtcctaaccatggaccggctcccatacccgaagaaggcaaatgggtaaaatcaaaagaaatagttgatatttcaggtttaacacatggtgtaggttggtgtgctcctcaacaaggtgcttgtaaactgactttgaacgtaaaagaaggtatcattcaggaagcattggttgaaacaatcggctgctctggtatgactcactcagctgctatggctgccgaaatccttccgggtaagacattactcgaagcattgaatactgaccttgtttgcgacgctatcaatacagcaatgcgcgaacttttcctgcaaatcgtttacggacgtactcagtccgctttctctgaaggtggtttgattatcggtgcaggtttggaagacttgggtaaaggtctgcgtagccaggtaggtacactgtacggtactttggcaaaaggtcctcgttacctggaaatggccgaaggttacatcaagaatatcttcttggataagaatgacgagatctgcggatacgaattcgttcacatgggtaaattcatggatgaaatcaagaagggtacagatgctaacgaagcattgaagaaagttaccggtacttacggtcgcgtaacacctgagcagggagcagttaaacatattgatccacgtcacgaataatataaggaggaaagaaattatgattagagaagtaaaatttgaaagtcaagaccgtcgtatcaaaggcatcattgaagccttgaacgctaacggcatcaaagacatcgaggaagctaacgccatctgcgacgctgccggacttgatccttataaaacgtgtgaagaaactcagccgatctgtttcgaaaatgcaaagtgggcttacgtagtaggtgcagctatcgctatcaagaaaggctgcaagaatgctgctgacgctgccgaagctatcggtatcggtctgcaagctttctgtatcccgggttctgtagccgacgaccgtaaggttggtatcggtcatggtaacctggcagctatgttgctgcgcgaagagactaagtgttttgctttcttggcaggtcacgagtcatttgctgctgcagaaggcgctatcaaaattgctgctaaagcagacaaggtacgtaaagaacctctgcgttgtatcctgaacggtttgggtaaggatgctgcacagatcatctctcgtatcaatggctttacttatgtacaaactcaattcgactactatacttctgaactgaaagttgttcgcgaaatcgcttactctgacggtgaacgtgccaaagtaaaatgctacggttgcgacgacgttcgtgaaggtgtagctgttatgtggaaagaaggcgtagacgtatctatcactggtaactctactaacccgactcgtttccaacacccggttgcaggtacttacaagaaagagcgcatgcttgctggtaagccttatttctcagttgcttccggtggtggtacaggtcgtactcttcacccggataacatggcagccggtccggcttcttatggcatgactgacacgatgggccgtatgcactcagatgctcagttcgctggttcttcatcagttcctgctcacgtagaaatgatgggattcctgggaattggtaacaacccgatggtaggttgtacagtggcttgtgcggtagacgtagctcaagctttgagcaagtaaataattacttaactaaaataataaatccctataatcttattgattatagggatttatatttttaacacaaacacagcaacttaacatattacataactctaaaagtgaagttctataatgaacaatacggtaatatctctattaaattcttgtaatttttgactaaagagatctcccacacatatagtaaaattgtagattttgactaataaagaagaattttcgaacaataaagcaagaaattagttgtatatttaagaattatacaatatctttgcagttgtttattatgatcattttctacgaacgtcaaccgagcactgatttctcttgcatttgtaaggatcacacatagaccggaaaaagaaaacgcgaattatctctaaacactaaataatatgtggaaaaaattattaggaactactctaattgctgcatttgcattaagcagctgcacagacaaagatgtttatcaaggccctaaggaagatgaaaaagaattcaacaccttccccttctctactgtacaaaaggacgtaaacttaaatgtaaattacgtaaatggtgctgtacaatcaaatgtttattttgaagtgtatgatgaaatgcctgtcgtcgaaagcgaatatggtacttataccaaacgtcaggatgtaaattacctgtttgctgcctatacccaagaagacggtacttaccaaggtaaactggaattgccttcatacctgacaaaggtatatatctattctcccgctttctttgcacaaaccctgatggaagcaaatgttgtggatggaagtatcgaagcaatagataatactagtactgatactcgtacaattactaataccagtactccatacgacagttatctggtaagtaatagatacggaaatgaggtatggaaaacctggttaggtccatacaatctgtataaaaacggggatattaattataagtacaagggaaaattagcagcaactaaaaaggatggtttatatactgcgcacacccgtattataaacactcatacaacttgtccacaagaatatcgcggttattcggatatgtacgtcaacaaggatgctgaagtagtagttacatttctgggacaaaatacttgttggacctgttcattgggatattactattataaagacggggaacaaccaaagaacttgaatgatgcccatgtaatcatgttatttcctaacacccaagatggtaactggtctaataatcccaatcaagcaaagaaaagtgccggtattgacccactgactgccgtacaactgatgtattatcctaatattgcaaccggaaataaagaaggagctactacaaccttccccgcaggttacagaataggttttgttctggcaaccaatggttggaacaatcatgttggtagctttagcggatacaagaaatatcgcgccgccacctctagcggtttgagcttaaacgatcaaggcgtgaactttgaagaaccgcgtactgctgtttatagatatggtgattggatattgacttcttttgaagattatatgactgacgagaatttcagcgatgttgtcattactttaaaatctaatccggtagatgctatcaccgatattcctgtaactaatcctgatgaagacaagacaagcattgacttcctgaaaggtacatacgcatttgaagacctttggcccagtcagggagattatgatatgaatgatgtagtcgtaagatataactatggcagcactttcgatgaaaagaatctaatatattccgaatcatttactttcaagactttccaaaatatagccagtaaccagaacggtttagcattccgtctcaaaacggaaggaaacatagaatctaccacttactctattcgccaacaaggtgaaaaggaatttacagaaaccacatttgaatacgagcctcaggataatgtatatcttttgaccacaaatgtgaaagaaaatatgggaacagaatataaggtgaccgttaattacagtaagcccatttcaaagcaatctgaagcccaagcttttatattcaaaaaggatgaagacggtttgcgatgggaagtgcatattcctcaggaaatgccgacatccaaaataaacaagaagtattttgggcagggagacgatgcatctaaacccaatcagagtatatactatgtacgtaaaggtaattacccatttgcctttttcctgagccgggcaacagaaagcgatttaagtaaattgctggacagtgctaatgaaaaaacagctatcaatctgttatatagtggatatgacggttgggtaagcagtaatggagaaaagaacaaagactggtataagaaataaaaaaaaattaaagaagaattgctcactatgtctcaaagaaaaaactgagaacatattagaaagtataaagagagtgtctgcttgctagctgacactctcttcatatttacacagatcatgaatttcccccaaaggacattctttattcagcctggcttattcattgaaccaatcaatttttttagagaaatacatcaccatagccaatatcacaaacaatccgagactaccggcaagcaatgcaaaagtctccaactgtataagaatgaaaacataaatatagagcacactgagcagacctgccataataaacgccggtttctttcttttaataatccccagcatatagcctcctaccagcataatcgtaagcactgatgccaccagatatgccattctgaaacctatatgctcggacatggacaacaacaaactatagaacagacaaagcgccaaaccgactaacagatattgcaaagcatgaatacgggttttctccattatctccgtaaagaatatcactgtaaaggtcaacagaataatcaggatagcatatttagtggaacgcatggactgctggtactgttctaccggcattttcagattaactccgaagttagagttctgaatatctttgatactggcattctgataatttataaacacttgcggataatttctgttcaagttcagcacttgccattgcgcagagaagtctttctccgtaatctcccgcttctccggcaggtaattaccatcaaaacttggagtattccagtttgctttcagggcaactctcgtagttttacccaagggagtaaaataaatggattgagatcctttcagctttatcttcatttcatagggtaacttccggtcatctttcagagcggaaaggtcgacaatggcatgaacacccatgctttcaatgccgcgtccatccatccccggctcaaacatataaacagaatcgttcaaagttatgctaacctgttcgctgagaccacgcatatcagtcagattcaagcatattgccgctctttgatattgaagtacatccatgtctacattactcttacgaagttcttccgaactaaaaaatcccttgattactaactccgactgatatacattcaccttataaattcctcgccgaagaatctccgtactcaactgtccgtctattgacaattcgtcaggaagcaatgtaacatttcccatagtcaccttcttcgtaccattatcttcctgtgtgataggatacttcagattgatgtaaggtcctgtaattgtctgcgccaaactccacttctgaccgacttcggcaatagcatccgtctgtgttcgcccgcgttccgaaatcatgtcttcgatcataaacatcggaattagcagcaacagaataaggaaagcaatgaccactgccttgatagatttagagaaacgacgcagacaaccacttgcctgttttctcgtttcattcagattctctgcaagatctccattgaaatcttcgttcaaattgtcattcaaattgtccataataaaatagtattaagtaagatatttagtattgtccggttttgtgtgaagccaaacatctatgttgatttcagaaaattctccaatgcttctatgtgagttttgaaagctttctttccttcggaagtagcccggaaagatgttttcggcttcctccccacaaagctcttctgacaaacgatataacccagttcctccaaagcccttgtatgacttgccaggttaccgtccgtcagtgaaagtaattccttaagagtattgaaatcggcatcttcatttaccatgagaactgccataatacccaaacggactttactttcaaatgccttatttatattttgaaatgcttctatcatctattatttccttctttcgtactgtaaataaaacaacatgccatataaaatatgaaatccgccaaaaccaattgtccaaaacattaaaccatgcccctcaaagaaacaatctgcaatgcccaggcaaagaaaagcatatcctaaccatgctacattggagtaagtgaacttagacacattgactaaagaaagtccatagaaaagtaacatcacagaagataccagtccgtaatgttcatgtagcagtaaagctatacagaacaaccctcccgtcaacaacggcaatgaaaaattccatgcaatacgataggttagtttactgaatagcttttgttgcatcttcttggccttataccaggacaagatacaggcggtaacaattgaaacaatcaaaaccagtgaagcaaccattatcagtccttccctattatcttctgatcttaataactgaccggccacataagcgccggctaatgcatacactccggccaatacagccgtcattccactgagagatacgaacttagaagatctttccatcaattcttttatctcatttactgattctattgctttatttctgtccatataaaaagtactttgtattgcaaagtacaatataaaaaatgaaaggagcaaagaatatcgagaaaaaatgtattcaatgagattaagccgcataagaatcactatatttgcaatcaaccaattatcaacagtcatagcctaatgatgaaacaattaattgcttgttgcggattagattgcgaaagttgcgatgcccgcatagctactgtcagagatgacaatgagttaagagaaaaaacagctcaactgtggagtaagctgaataatataccggagattacggcagataccattaattgtatgggctgtcgtgtggatggagtgaaaacgatgtattgcagcgatatgtgcgcaatccgcaaatgcgtaaacgaaaaagggtttaacacctgtggtgattgtaaagaattggataactgccagatagtgggtccaatttttcagcatactcccagtgctaaagaaaatcttctataacattttatcgcattcgtcagctttacaacctgtatatcatcttcccttatctttaaaataaaaaaacagcatttgagatcctcctatgctgtttccttttctcttatttgaattagatactgtcttatcgtgataccctccctgatgtatttccttgcatcaggctctctacttcttccaccatcacatgattaaaatcaccgtatacggtattctttaatgcagaagcagccaaagcatattccaacgctttttgatcattatccggatacgttataagaccataaatcataccaccgacaaaagcatcaccggcacctacgcgatccacctcgcactcgatatcataaataccagtatgcttcaatgtgttatcagaatagagaatggcagccagtagattatgattggaagtaatggaattacgaagttccagaaaagccttctggcaacgaggaacaagctccaccacccgacgaccaaagtcttcaaaagcaggaagatttgcttcaaacgtagtatcctcagcatctacggctttaaaaccgacaggttgtatgccaagtatctctttatattctggttcggcaccgaaaatgacatcactgtattgcaccaaaggctgcatgacttcggcagcggaactcccatagttccaaagtttcttacggaaattcaaatcacaggagatagtcaatcccatacggtcagctatttcaagagcctcacggcatgcatcggcaccatcttgtgacaaagccgcagcaatgcccgaccaatgaaaccagccagcatcggagaatatcttttcccaatcaatcatacctggacgcaatgtggcaaaagaagaaccctcacggtcgtaaaccacattggaattacggaatgccgcaccactttccagaaaataaagccccatgcgcttaccaccaaaaacaatgccttccgtacctaaaccgttagcacggagtgaagctatgcaggcacgtgccacagcattgtccggcaggcgggttacgaattctgtaggaataccaaagttagccaacgaaacggccacattagcttcactgccaccgtaagtggctatcatttgattggtttgtgaaaaacgaaggaaatcaggagcagtaagcctcagcattacttcaccaaaagtgattactttcttatctgtggcaatttgtttcttgtacatacgttgtcaataataaagtttaactaaacaccaaagttgtatttttattccaagtaaacgcaaagatataataatatttattggcggaaaagcagggataaaacataatcatcagatttgttgtaactttgcaaagttttaactgatataacaaacagaatgagttcattgaaaaaaattccctctcctttagtttccctcctgcctatcgtgctgttggtaggaatgttatttgccaccatacatacattcggaagtgacgcactggaaggaggtagccagatttccctactgaccactactgctttttgcgtattcataggtataacattctaccgtgtcccctggaaagattacgaactcgctattacaaataatatatcaggagttgctacagcaattattatcttgctgataataggtgcactgagcggtgcatggatgataagcggcattgtccctacccttatatattatggtatgcaaattattcatcctgacttttttctggcatcaacctgtatcatctgcgcactaatctctgtcatgacggggagctcgtggacaacaatcgccactatcggtatcgcactgatgggtattggcaaagcgcaagggttcaacgaaggatggatagcaggagctattatctccggagcatattttggtgataaaatctctccgctgtcggaaactacgatacttgcttcctccataacagacgtgcccttgttccggcatatacgctatatgttaattacaaccactccatcgttgattatcacactgattatctttacagtaatgggattcgtcatcgaaacaaactctactgcgcacatggcggactttgccacatcactgaaagataccttcacaatcactccctggttactgattgttcccttagtaaccggaatacttattgctcgaaaagttccgtccatcattaccttgttcatatccactatgctggcaggtatttgcgccattatcttccaaccggatttgctacgtgaaatagcaggagaaaataacatcttcaaaggggtaatgatgatattctacggaagcaccggtctggataccggcaacagtatgctgaccgaccttgtgtctacacgtggcatggctggcatgatgaatacagtctggttgattctttgcgccatgtgtttcggaggtgccatgacagcaagcggtatgctgggcagtataacttcagtctttgtacgtttcatgaaaggaagagtcagcgtcgtagcatccactgtttgctccggactgtttctcaatctgactaccgccgaccaatacattagtattatcctcaccggaaacatgtttcgcaatatttatgagaaaaaaggatatgagaaccgattattgagccgtactacggaagatgctgttaccgtgacctcccctctgataccctggaatacctgtggaatgacgcaggcaacgatattgaacgtatctacgctgacctatcttccttattgctttttcaacattatcagtccattaatgagcatcctcgttgcggccatcggatataaaattgtgaggcgtcccgtgaacaatcccgaataaaggttgttttgcaataaacgaacaagaatcgtaaaacctaaacattaaagaattatgaaaaagtttattgcattagtagcattagtgatgatgagtgcggcaacaaccgccatgtatgcacaagaaagtagagcggaacgccgcgcagaccgtaaggctcaaagagacgctgaacgcgcccgcctgaaagctgaagaacaagtagccgacgcagtatcgtatgatgacgctgtagccgcattgaaagcccaccaattcgtactggaagccgaccaggtgatgttccgtaacggacagacagctttcgttaactctaacaccaacttcgtactggtaaatcaaggacgtggtaccgtacaggtagcattcaacacggtatatcccggccctaacggtatcggtggtgtaactgtagatggttctacctcggatatgcagattacaactgacaagaaaggtaacgttaactgccagttcagtattcagggtatcggtatctctgcacagattttcatttcactgactaacggtggaaacaatgctaccgtaaccatcagcccgaatttcaactccaatacgatgacgctgactggtaatctcgttccattaagccaatccagcatctttaaaggacgttcttggtaaagccctttacaatatatatatttccactccgctgcaaattgccagaaatgtgtacatttgcagcggagtttttatatttttgcatccaaatatgagagaatttatcattgcagacaaccaggacatcaccaaagcaggtatgatgtttctactcagtagtcagaaagacacagccttgttactggaagcagataacaaagccgaattagttcagcaactgcgtctgcatccgcaagcagtagtgatactggactatacgttatttgatttttctggtgcggatgagttaattgtcctgcatgagcgttttaaagaagcagactggctccttttctctgatgaattgagtatggaatttctccgacaagtattattcagcagtatggctttcggagtagtgctaaaggataattcaaaagaagaaatactatcggcattgcaatgcgcttcgcgaaaagaacgttttatctgtaatcatgtcagtaatctattgctgtccggcagcaatgcatctcccgtacgccacacgctgaaagatgatttactgacacctgccgaacgaagtgtactgaaagaaattgctctgggaaagactacgaaagaaattgcggcggagaagaatcttagctttcatacggtaaacagccaccgcaaaaacatatttcgtaaattaggagtgaataatgtgcacgaagcgacaaaatatgctatgaaggcaggaattgtggatttagtggaatactatatataaaaagactattcaaataccaatctctccactgccgatacatattcgggaagcttcatcatatacgacaccgaattgtccgggagcaataccctgcaaattttcagaagatacaatacgatagatctccccttcccgtatcagttttcctttcataaattccggtgtatggcggattttaaaagttacatcgacttcctgattatgtaaccagggattttctgtaatgaaatgaaaatcatgaatcttaaattcacgcccgtactgccattgggtgtcatatccccgtgagacataaagaacatttgcctcaacatctttccgaatgacaaaccaaggaccaccactcaatcccaatcctttgcgctgtccgatggtatgaaaccagtacccccggtgtgtaccgattttctttccagtctccaattctataatatctccttgccgctcaccaaggaaacgacgcacaaagtcattgtagttaatctttcccagaaagcaaataccctgactgtcacggcgacgggcagtaggcagtcctgcattgcgggcaatgtcccgtacttcctgtttcatcaatccaccaagggggaacatcagtttggagacttgcaaataatcaatctgcgcaagaaaatcggtctgatcctttactggatcgacagctgtgcccagccataccttaccatctttatggaccgtagtggcataatgaccggtagcagtaaaatcaaactctttgcctaccttctgttcaaagcaaccgaacttaatgaagcggttacacatcacatccggattaggagtcaatccacgacgaattttatcaatggcataagcagcaacttgttcccaatattctttctgcaaatctaccatttccaaaggtaatccgtaacgatgtgcaatagccgtagccatctcccaatcttcttcagcagaacaatccatataatcggtgccgtccattcctatcttaatataaaacagagacggccgatacccttgctcacaaagaaggtgtacgacaactgaactatcaacacctcctgataataaaacagatatattcattcaaaacagtttagaatattacttacaataaataaatattagaagcacaattgtatatttagcctatctcagtcgtatacttagggtacctcagtatcatacttagggtatctcagtcccatattgagataagaacatcacaactacactgatagccaagtaattacaaatcgtcttttcaacatcaataaatcataacaaacaatcgacaaaaaaaattaaaaatagactcattactgtagggttatgaattaattcaccacagattacacagattcacacagattttattttactgattattagattaataaatctgtgtgaatctgtgtaatctgtggtgagtcttattcattactataccgttatgaaccaattatattttatccaacgcctgagccaagtcatctagcaaatctgcaatatgctccgtaccgatagacagacgcactgttcccggcttaatgccttgttcttccaactcctgttcattcaactgcgaatgtgtagtggtagccggatggataacgagtgacttaacatccgctacatttgccagaagtgagaaaatttgtaggttatcaataaatgtctgtgcctctttcaccccaccctttacttcaaaagtaaagatagaacttgcaccattgggaaaatacctttgatacaatgcatgatccggatgttccgtcaatgacgggtgattcaccgctgccactttaggatgtttcttcaagaaatcaaccaccttcaacgcattctctacatgacgttccacacggagggaaagtgtttccagtccctgcaataaaataaaagcattgaatggactgatggtagcgcccgtatcacgaagcaggatagcgcgaattcgagtaacataagccgcagcacccgcagcttcagtaaaacgtatgccatggtagcaaggctccggttccgtcagttgaggaaatttgcccgaagcagcccaatcgaacttaccgccgtccacaatcacgccacctaaggaactgccatggccaccgataaacttcgtagcggagtgtaccacgatgtctgctccatgctcaataggccgtatcaggtaaggtgtgccaaatgtattatcaatgatcaatggaatcttatgacgatgtgctatttcagcaacagcttcaatatcaataatgttggagtttgggttacccagagtttcaatatatacagcctttgtattctcctgtatagccttctcaaagttcaagagatcaacaggatctacaaaagtagtagtcactccgtaggcaggcagagtatgctccaacagattatacgttcccccatagatggttttagccgatacgatatgatctccggcacgagtaatattctctaaagcgtaagtcacggcagctgcacccgaagcaaccgccaatccggcaacgccaccttctaaagcagctacacgtgcttcgaacacaccttgtgtagagttagtcaaacggccatagatattgcccggatcttgcaaaccaaagcgtgcagcagcatgggcagagttgcggaatacatatgaagtagtctgataaatgggcacggcacgtgcatcagtagccgggtcgggttgttcttgtcctacatggagttgaagcgtctcgaaatgcaatttctttgtttccattgtctttgtattttttaggattaattgattgagtgcaaagataatgggatgttatgacatgggcaatgacacaagatagggaattttataccacatttatggtagataaacaaactattcgctaaatttgcaacgaaaaccaaacgatagatacagatgagaagaaggaatatacagcttttcctactattgggagtccttgcattgacgagcttattctcttgtggagtagaccgttggccggaatattacaaatggaccggacgcgatctatggatagacagcgtcatgagagaagaatatctgtggtttgaagacatacccgactcaaaaaacgtgaattatttccttgccccggaggcttttttaaaatcaataagatcatcacttgataaagattactccagtgtcgatacattgtatgccactcctacaccgagctatggcttcgactattccctatatcggataagcggtaatgataccgcctataatgcacttatcacatacgtcattcccgaatctccagcttccgaagtcggattaaagcgaggcgaatggatcatgcaaatcaacgatgattatatcaccaaaaaaacggagaaactactgactgaaggtgaaaatcagaaactattgttaggaaaatatgtttcagctgtcaatgacgaaggagaagatgaaagtaagattgaatcttatcgtgacgtagttcttcctgccgcccgtcccgtagaggacgtcgccatacctgcttacgacgtttactccagtggaagtataaatgtaggttacttggcatacaacagcttcaataaagaagataatagtgagctactccaactatcgcagttctttaaagataaggatataacagatttggttcttgacttgcgctacaatgccggtggagaaatggagtgcgtacaacttctggcagatattttggtacctgccgacaaattgaacagtcccttcgcctcactggaatatagccagaagcgaaaatataaagaccacgaactcacactcgacagcaagcttttgcaagggggtgtgaacctaaatctatcgaaagtgtatgttctgacaagcagtacaactgctgctgcttcggaaatgctcattaattgtttgagaccgtacatgacagtaataactataggcaccacaaccaagggagaaaccgtagcaacagaaagtttccccagcaatcaattcttatgggtgcttcgccctgttgtatgccaagtattcaattcagaaggtgaggcggactacaccaaaggtttcacaccgaattatgcagtcagtgaactgagtgattttgcaaaagtactgccattaggagatcctaacgaggctttgttcagtgcagcaataggtatcatcgatggtagtatcgtgctccctgaacctaaaccagaacccgaaactcaaatgacagtagtaaaaagtgtgaaagtaaagcgctatttctgcaatggtcttatcattaaataacccagaatgaagaagaatattttcatagctttactattcataggaggattgacagcttgtagtgacaataacgagggctcagatatacccgataatccgggatatcctgtaactcatttctctaaaatagaattaaaggaagtcaaggaagagccaggtgcaccagctgttactgttactcagacttacgattatagtgccggtcgattgattaactttacatctacacaaagtttcgtagctggaggagaattgtttaagatagaaaatgcaacaaatgttgtttatggagatcatcaagctgtagtaacagatgaaattaataatatctcgacctacacgttggatgataatggctatgctataagttgcgtgcgccaagaaatggatggtaaaatacgctcttatactttcgattatcttatcaatacagagggaaaatacttcctgaaaaatataacagaaacattagacggaaataagtcctattcttctatcaacatagattatagtagctatagaacactacgcatcacccagcaggttgacaagtctgaacaaacttacatagccagcacatctaccggcaatgaaatagccaacacttcagagattccgtacctattcctgacagatctatatcccctttcattccactcggttgccatttatggaaaattcttgggagatgcatacaatactctgattactgatctcagaccagaggataacagtggaagtaacgaaaccaccacttacacttataggttcgacaagaaagatgtcgacatctcatgcagcgagttaaccaaaagttacggtacggactatgcacgtaccgtagattatatcatgaaataaactaaggatattacttcttgaagaatttatcgaagaagagaatctgatagtcaatagaattattccagtattgcccgttatgcccaccgggacgggtaatgaaatcatggctgatatttttttccagcagaactttatgtaatgctttattcacttccaaaaagaaatcttgttcaccacaatcaataatcaatgccagatcaccatccttgattttatcaacttgagtaatcactgtatgctgatcccataaagtcttatcagactcataatcaccgagttgtttgttcatctcccaattcttcggaaaagggcgaatatccactccaccactggtacttcctcctgcaccaaatatctctttatgacggattgcaagccacaaagcaccatgtccacccatactcaatccggtaatggctcgtccttttttctccggaatagtagcatagtttttatctgtatatttcaccagttccgaagctacaaaagtttcataacgataagcctgatttttagggctatcccaataccaactgtttttaccatcaggacatacaaagataattcctttttcatctgcaatcttaggtaactccggtttcaatcctacccaactacgtgcattaccaccatagccgtgcaacaaataaactaccggacaagcctcagcttcctcacccaatgctttatcagggagtacatataccacttgtacttctttattcatggatgggctttttaccataacggtatctactcgtgccgcctgtgtcgcaacaactgaaaacagcaataaaacgctaaataaaatttgttttcttttcatgtctttcattctttaataatctctataaataggcagcaatattagtaataaaattcaaaaaattagtaattttgcaatataaactattcataacctatatggaatttattattattctatttttattagtgctgaacggtgtctttgccatgtatgaaatagcgttggtgtcatccagcaaagcacgactcgaaaccctcgcaggaaagggaaacaaaagagccaaaggagtactgaaacagttggaagagcccgagaagtttctttctaccattcagattggtatcacgcttatcggtattgtatccggtgctttcggtggtgtagccattgccgacaatgtagcaccgttattcgcctccattcctggagtcgctccctatgctaaagaccttgccatgattacaacagtggcaatcattacgtacctttcactcatcatcggtgagttggtacccaagtccatagcactgagtaatccggaacgatatgcaactctacttagtccggtcatgattttactgaccaaagtgtcttatccattcgtctgtttactcagtttctcaaccaagatagtgaataaactaatcggcctgaacaatggagaagaacgtcccatgacacaggaagaattgaaaatgattctgcaccaaagttcagaacagggtgttattgataaggaggaaacggaaatgttacgggacgtattccgattctcagataagcgggccaatgaactgatgacttaccgccgtgaccttgtcgtactacatcccacatacacacgtgatgaggtactacacattatccgcgaacaacatttcagcaaatatctgttggtagagaaaggaaaagatgatattatcggagtagtgtccgtcaaagatattattctgatgttaggcaatgatcaccccttcgatttacgcggtatcgcgcgttctcccctgtttattccagaaagtttatatgccaagaaagttttagagctatttaagaagaacaaaaataagttcggagttgttgtagacgagtatggtaacacagcaggcattatcaccttgcatgatctgacggaaagtatcttcggagacatccttgaagaaaacgaaatggaagaagaagatatcgtcacccggcaagatggctcgatgctcgttgaggcttctatgaatgtagatgattttatggaagagatgggtatcctgagctatgatgatctgaaagaagaagactttaccacactaagcggtctcgccatgttcctcatcgggcgggtacctaaagcaggagacttgttcagctacaagaacctacagtttgaagttgtggacatggatcgtggacgagtggataaactgctcgttatcaaaaaagaagaggaagaatagtgtgaatttgcattatatattaacttaaaccattaaagcaatgaaaaaagtaatgatgattgcagccatcgctgctgcattggtatcctgccaatcaaaaggaacccagaacaatgattccgccgtaggtgaaggagtgttgacagttgccgggaatgattcttctgccgtagccgtatacgaaggtcttcttcctgctgccgacggcccgggtatccaatacgtattgagcgtggacagtgtaggtcctgacggagaaagcggttatactttggttactacttacttggatgcggaaggtcagggaaagaataagagctttacttccaaaggtaagaaacaagtcatcaagaagacagtgaacaacaaacaaaagacagcctacaaactgacaccgagtgatggtgacgctcccgtctacttcgtagtagtgaacgataccactttacgtttggttaacgatagtctgcaagaagctgtcagcgacctaaactacgatattattcaagtgaagaaataatcagcaaaacatttcatgcgagaggagctaaacgagagttagctcctcttttttattactgttcctagcaatgagacacttgaaaaaggttttgagaaaatactgcaagctactcttccaacatcaggctatctttgtatcattaaccatttttatatttaatgatatgaagaaactgatttcaacgattattatcttatctctgtctactctggcaattacagcacaaacgtacaggatggagaacaagcacttggcacgcattgtacaagtaacggatggaaggttacatacccagaccattcttaataaacaagctcaaacagaattgactccaacaagttgtgacgagttttcccttcgtttctcaatccccggtgaaacagaaaataccgattacattttatctgccaaagatttcatagtaacttccgtttctccttatgcaaaccccaaacgcccggaaagcaaagggtatcagttccaactacggggcaaggagaatgacttttctttaattgtctattatgaattagcctctaatgatgccttttgtcgaaaatccctgcgattcacttcaaatcaggatattcttttaaaaagagtgaatgtagaagctattgctttcgaagatgcgtaccaaaattatactctcaagaaaattacggcaagaggcagcgcccaatggaaacctggattgggacaacctgtttatactactaaaaccggaactttctggggaatagaattccccgctgccaataatgaagtgagtaacggacaaatcaattgcggttatctgtgggggcaaatcataagtaaaaatacaccttatacatcatataacagtatcattggtgtaagtggcgatgtacacgccatagacaatgcattctatacttatatcaataaaataaggaaacgcccgttgcgtctgcagattcaatacaatagttggttcgattactcaagaaaggtatcaaaagagaaatttatccgcagcgtagagaaaatcaatgacgaattggtaacaaagagaggctgccagcctctgaatgcgtacatcattgatgatggttggcaagatacaagtaaagaagccgattggtcggacaaggtatggacaattaactccaaattccaaccggattttaccgactgttttcattcggtgcagaaagcccattcacagttagggctctggcttagccccggttgcctctttggcggacaacccatgatgccccggatgcaggaatatggttttgagacactctcctatggcatgtctatgacggggaagaagtatatgctgaaattagaagaacgagtattagaactggcacgtatgggaatatcctacttcaagtttgatggtttgttcggacatcttaatctccgggacttcgatattgctgataatccttttccgtcatccaatgatgaaagactaaatgatagtcactttgacgagcaaaaaggctattatctttcagcaggaacagaaaggctgatacaaatcttcgacaaactgaatacagtcaatccggatatctttatcgccatcaccaatggcgcttacctcagcccgtggtggctgcaatacattgatattgtatggttgattaatgcaggagatgccgcaaaaggagacaatcgaactggtgaactggtttatcgtgaccagatttatcatcaaatatggaaagaagagaataccaaattcccaatgagcgccatattcaatcatgaaccgaaaaaaacgcaaacaaacgaaacacctgaaacttttagggattatttatatatgaacttcagccgaggcaccggttttattgaattgtacatcaaaacggatagcctgtctcctactgattgggacattctttctgacggtctgaaatgggcacgaaaagcatttcctaccttcaacaacgtagttatgcatggaggatcacctcaacgaaatgaagtatacggttatacagcctggaccgaaaaacaaggctatatttccttacataatccttcggaaaagtcacaaagctatcatctcaagctagataaggcgctgggagtacctgaaacaaaaaaacgtttcaaagtagactcacctattactaatattcaagaaaggtcattatcccgacattatcattacggtgataccatttctgtcactttatctccgaaagaaataataatccttgattttatacgctaaaaacatctgctgaaacaatatatataaggattgaaacaatattttaaatcccgcattgccactacgtgtacctttgccatattaaatcaaacgaaaacaggctctcatgaaaagattactattcacattattttgcttcgctacgttagcccaggcacaaatccccactaacaagcgggaaataatgcagcagtttctatcaggtacattagatgaagaatatataccggctgcgtttttcatgcactttgggaaagatgcacgcatcggagaaaaagccattgacgcacatttgcgctattttctttctacaggcatggactttgtaaaaatccagtttgaacaaggatacggacgtatacggattgatgaatcagaagattgggaacaaataaaaccactcccggcagatttcttcactccaacgttggaaatagtaaaaggtatctatgatattgccggagccaatgcaatgatactgcctaccgtttattccccattccagatgctaatacaaagcgtaggagccaaaactgtgatggcatatgcccaaacagaaccggaacgcgtaaaaaaagcacttgaatattttaccgaagcaattatcagatacgtaatagcatgtaaaaacgttggtgtggatggcttttatacatccacgcaaggaggtgaaagtaagttctatataattcccggattctttgagacctttgtcaaaccgtatgacataagagtgatgcaagagtgtaacgacggaacccagtttaacatactccatatttgtgactacgaaggtaagtatgacgatttaacccgtttcgtgtcatatccgggccaaataattaatgcgccctgtgaagtagccgatcaaacttttagtctacaagcatgcgaacaattatttaagcgtcctgcaatgggaggattatatcgtaaaggcgctatattagaaggaagttctgatgaagtggcaaaagaaatatatgaactaaagaaatccttgaaagggaaacgatttattttaggggcagattgtacaatcttgtcccaaacaccaatggataacatcagaactgctattaaaacatcacatcatactcgtaatatagaatgaatcataggctttttaaattcatagttagttggtaaataggtattatatctcataggtcattttagattgttgatcgaaaagcggttgttgtgagacacccgctttttattcttttgtattatctaaattaagaaatatcatgaataagaaatcatttgcatccactattattgcagtaatattcgtttgtccggttttggcggtgacacatactttcacaccaaccgacatcggaagtttaaagatcaagatgtctgacggatctttacaacctggtgatactctgcttttacaagatggaacctattcccatcttggtaaggttagttttacaggaaatggaacagcagattatccaattatactgaaagcagcgaataccggaaaggctatcatatccggaacaacagaaatacgtatggcaggcagttatctacaattggaaggactctactttcataaagcttgggcatctgactttgagatgatagaatttcaactggataaagaacacccagccactcattgccggattacccaatgtgccattgatgattgcaatgaccctgccaaaggagagaaaccggggggagggactgaaaactggattggactacatggaaacaataatcgtatagaccactgttattttgccaataagcgcgcccgcggattggttatacaaattacagtagaagacggtggagatcacaatcaccaccaaatagatcataatatatttggttatcggaaaccctttggaggtaatggtgcagaaatcatacgcgtgggtaattcctggtcatcacaactgccttcctacagtatcatcgaagaaaatatattctatcattgtgacggagaaaatgaaattatttcagtaaaatccggtttcaataccgtacgccgtaacttgttttacgaatcgcgtggcggcttagtatgtcgtcacggacataataatatcatagattccaatgtcatcataggtaatcagctccccgggacttcgggtatccgtattatcaaccaaggccatactgtcagtaacaattatgtggagggggtaacggggaaaggttccagtgccgcctttattctgcgcatgggggtatatgaacgtcccagtgccccggaagattatgaagatgaaaaacttaaatcgtatcatcgggcagcgaatatcgatatcgctttcaatactttcgtggattgtgccgaattgaactttggagacgggcaaggagataaggaaccgcaaaacgtacgttttgcgcataaccgaatctattctcccaatactttcccaaatatcaaaatcaataatccggctatatttcccggcactacatttgtcgataatctctgtcagttcaaaagcaaagaatcaccggctattaaaggatttcaaagtattacattcaataaagaacaaataaaggctcaacgccggcaagccgtctcacccgcagattgtggtaccacctggcacagcgctgagctaaatgaaatagatactcttacaggattaatgcaacaataatcaatcaccaatattgccgatgtctggttcgccgggcgtcggtaatattttacacgtcattctacctttaatgcaatcttttgtttcggaagccccttagattctactgtaagtactacttttccctgcttcatatactggctacgcaaaatgactaatgccaaaccgttataagcatctctttctgataactggaatggtaataaacttgttgcgtctccattatctgtagctataatctcagcaggccctgttacagaaaacttcaaatgattcttagaacgaggaacaacacgaccttgagagtccacaacagctacacggataaatgataaatcagtaccatcatttttaagctctgttttctctgccgttacttgtaaagcggctggttttccagtggtctctacaagctcttccgcccacttctgaccgttcttataagctatggctttcaaacttcccggttcataacgtacatcatcccaggtcaaacggtcatacgaatgagctttctctctacgccccagtgacttaccattcaaaaacaactcaacagcatctcccgaagtataaatatgaacgggagttatttcaccaatccgctcttcccagttccaatgaggcaatatatgcacagtgggcacatcaggacgccaatagctcttataattgtaataacgatccttcggaaaaccacataaatcgacaataccaaaataagaactgcgagaaggtgttttaattttgcctaactcttccaattcctttctagccttttctaattcattcggatcactgaagttcaacaaattggttaagtctttattataaggagtaggttcgcccaagtaatcgaatccggtccacacaaactcaccactcataaacggatattcttcattcattttaaattgaacctcaggagcacatccccatcctatagttgtcatatcatatgatgaaagctggaagccggaacggctatcgttaacgtcagtagttacagggaagaaatattccccacgagaactcgttgcagaggaagtttcactggcatgataacggcgagtaggattctgctctttaaaaaccggataagttttatggaaatagttcagaccaaatatatccacctgattcacaatatcacggaaaacagcatcccgcttattacaccctaaagaagtaggccgtgtaggatcttcatcgtgacagtaagctgtcaggttacgagctattatgactccctgatcggtcgtctgatcaggcatttcgttacctatactccacattatgacagaaggatgattacgataatgacgtaccaacgagcgcatatctgcttcactccaatcatcaaaaagaagattataatcattcttgcgtttccctttttgccaagtatcagctaattcaagctgcatcatcagtcccatacggtcacagagagcaaccaactccggtgccggtgggttatgtgaagtacgaatggcatttgcacccatctctttcatgatacgtaactgcctttcggcagccacttcattaaaagcagcacccaaagcacccaaatcatgatgcatacacacaccttttatagctaccttttgtccattcagcatgaaaccttggtcatgggtaaattcaattgtacgaattccaaaaggagtttcataactatccatttcttttccatctatgaacacgcggctgaccgcaacatagcaattcggagtatcaatatcccacaacttcggtttatttattttaaactgaaagcgagcactcgaccagctatcttttttaatcgcaatattcttagccatactttgagccacttcttcccccacaggacgcccgtctttcccttgcagatatacacttgtctgcaactttacctgaacatcttttcctgcatgattctcaatattcactcccatttccataacagcaatttcggaatcaacctgctgatttcgcacaaaagttccccattgctccacgtggacaggagaagttttcactaaccatacattccgataaataccactacccggataccaacgtgaagtatcgtccggattatccaatcgaatagccaacacattcttttgtccggcctttatataaggtgtcagatcaagacgaaaagaagcatagccataaggccatccacccacatattgcccgttacaccacacggaaacgtatgacatcgccccatcaatatcaagataaatttgtttcccggcatcatcctgcgataactccagtgttttacgataccagcgtatcccccaataaggtaactttccagtcgaaccgttatagtcaatattgaaaggcccttcaatagcccaatcatggggtaaattcagatgtcgccattcactatcatcaaaatcagattttacataggctatattttctcccggattgccttccggtctctgatacctcttcccaaatataataaagtcattggcacaaggtaataaataaggctttagtctagagtaatgtaatgcagcacctaccccatccggatcatctatctgataacgccagtcacgattaatgtttatgcgctcacgcaccattgaggtatttgcacaaacaacatctcgccccacaatgagtacaaaactcaataaaataagaaatctgtttttcatactattctgttaaattgttagcactacaaaagtaaggaatagaaagatagacgattatcaatattatctatgcttctgttaatactgtctcaaatatcttttaatatggaccttatttatcaactttgtatgcaaatagcatgttgctaaatacagtttcaattcatagttaataaccaacaaatttaaaaagccatgtacaaatattctaaggatggagtttccgtactcacagtattagataaaagaaaacaaaagatgaatggattatttcccataaaagtacaagttatccacaacagaaaacagaaatattactccaccgggcaagaagtttctattagagactgggaagtattaccacataccaaaaatcgtcacttatctgaaatacggcgtaacatcgaaaatagtttttctttaatcaggcagcaagtcgaatttctatcttttcaaggtgaatttcattttgacatcttaaatgcacgcttaggtagatattctgatttttcagtaaatgctttatttcataagaagttagaggagttaaaggaaaatggacaagccaatacttatctgtcttataaaggttcattaaacaaaatagaacagtttgcaggaaagcacatttcttttcatgaaattaccatcaactggttaaaccgttttgaacatcacttatccgcgttaggaatcagctactccagcatgggattttatttcagaaatctcaaatgtattctcaatatagcacgtaaagatggtatcatcaaagaaagtcagtatccttttggaaaaggaaagtatgaagtacccactggatgtggacgcaaattggcattaaacctgaaagaaataaagaaaattattacttataatgatggaacccaaaagactgaaatttatcgtgatctgtggttcttctcttatttatgtaatggcattaattttcgtgatttattatacttacagtactccaatatcatcaatggagaaatctgcttcatacgtgcaaaaacagccagaaacaccaaacacagtaagattatccatgcagtcatcacgcccgagatgcaaaagataatagagaaatggggaaatccacctaagtcacctgaaacttatatttttcctttcgctaccggaaaagaaaatccgtttgaaagagtaaaactggtaagggatgttgtcactgaatgtaatcagatactttataaaatttcccataagacaggcattccacgcgtcacgacctattcagcgcgtcattcatttgcaacagtattaaagcgcagtggtgtcaacatttcctacatatctgaaagccttgggcattccaatttagctattaccgaaaactatctcgcaagttttgaagctgaagaaaggaaaaaaaattcaatactcttaacaaggttcgatctataaaacaaatatgtatatgtaaatagcatgttccgtagtgacgggcaaaaactatttccatctctttcttttcacaagatcaaaataataactgcttttcatagacagagtttaaaatgatgtattgatattatgtaagaaaacaatcaaaccattaaaactcaaaaagaattccaggtgaaatccctcgttaatttaagtctaattttaaaaagtagtttaatgaaaaagaaagaacacaaatcgaaatcgcttttatggcggttatctttagttctattagcattggtcttgagtattaatcttatggctcaaacaattacacagacaggtgttgttgttgaccaaaacaatgaaccaatgattggcgtaactgtgcagacgaaaggtacagcaactggtggtattacagatttagatggtaactttaccattaaatgcaataaaggtgccacattagttttctcttttatgggatacaaaacagttgagcacaaagcaagcggtcaaagaatgaagattgaaatggctgaagatgctcagactctggatgaagttgtaattgtcggttttggttcaatgaacaaaaaacatattacaggttcaatgacttcggttgattctaaaatcttggaagaaaagaattcagtgaatgtttttgatgcattacaaggtgctgctcccggtatgcaaatcgtatcaaactccggagcacccggttcttcttcatttgtatctatccgtggtgcttctacttttagtgatgaaggtgtctctccgctgtatgttgtagacggagtagttgttgataacattgacgatatttctgccaatgacattaagcaaattgacgttatgaaagatgcagcttcttcggctatttatggtgctcgttctgcaaatggtgtaatactgattactactaaatcaggtgaatcaggaaaacctcgtgttgatgcacgttaccaacattccttttacactgttgcccgtaaattgcctcaggttaatgcgtttgaaagccgtttaagtatggcagcttccgatttaaacaatccttccaaaactttagagaagttttccgcacgtacagactctgtaggcatgcagtatagtacaaactattattatcaggatttattgttccgtacaggtggacgtgatgatgccagcgtacaaattagtggtggttccaaagggttcaaatatcgtgcatctttgaactacattggtgaaaagggtgtaattctagagtctggaaatgacaaatataccgctaacgtcaatgttgattatgaaccgtggaaaaatataaagtttaccactcgtgttcgtttaagctacaataaaactaataatattaaagaaactgttttgcaagatgccatgcgtcgtgatcctgatatgattatctggtatccggatggtgaattaattccctattattcttcggggggacgtcgtaatcctattgctgagctaaaacaaaagttagatgaacgctcgacttatagaggaaacttttatcagggtataacctggacatttactccttggttaagattggatgctgacatttcagctgattatacatctaatagaaatttaacattctcatccaagtatctggaaggaagtgataatgggaaaaatacaggagcagataaaagccaacaaacttggaaatatgcaggcgaagcttatttaaacttcaataagacaattgccaaagatcattctttgagtgctatggttggtagtagtttcgaagttagtaatcaattggcatataatatagccggttcgttttttctctccgaagatattcattatatgaatttggctactgtaaaagacgtgaagaatatcaatacaaccggttgggatgaagctatggtaggtgtatttggacgtgtagtatatagttggaagagtcgctataccgtgactggtaatcttcgatttgacggttcttcccgttttggtaagaataatcgttggggatctttcccttctgtttctgctgcatggcgtatttcggatgagcccttcatgcgttgggctaataacattcttacggatgccaaaatccgtgccagctatggtattactggtaatgataaaattggacgctatgaatcgcaaaccgtttatacggccggttcccaatattataattcagtaggtggtattgtacctgcatctaaatatggtaatcctgacttaaaatgggaacagaccaagcaaacaaatatcggtgtggatttgagttttctgaatggacgtattatgtttgttgctgactattacataaagaaaacgagtgacttgctttctgactataatcttccaagtactaccggttatgataaaatgcgtgtaaacttggctagtattgaaaataaaggtgttgagttatcacttacagcaacaccagtcagaacacgtgattttagctggagtactactgtaaattggtggaagaatgataataagattcttgatttggcacgtgaggattatattaatagtgcttggctgattgcagcaggaaaaccagctggtctattctatggttataagaatttgggtgtatatgaatatgacgcaagtaatgcctggactcaagattataaaaaccgtctgactcctgttttcaaacgggatgatgaaggtaatgttgttataggtttaaatggtcagccaacattggaaaaatatctgaacccagatggtactgaatatacaggcaaaattgctcagatgaaagtaaatggagtaattgctggtggtggtgatgtcatatggtataacaagcctaatgaaaacggcgagttagatgatgtgatcaattctaacgaccagaccgaattaggcaaagcaaatcctgattggtttggctcctgggggaatacccttacatataaagacttttctctttcatttaacttctatgttagttggggaggacaagtctggaatgacttgaagcgttattattgttcatggggaggaaatactcataaacaaactcctgaatatattatgcaaggctggaaatatccaggtgagatcacaagttggtatgcattgaactccaaacagcgtaaaactaataatcactctatgagtttgagcgatcagttcttggaagatgcaacttttattcgtttacaatctgttcgattaagttacagtgtggatcctaaatttttaggtaaaactccactccgctcagtacaagcatatatttatggtaacaatttgctgacttggactaattatacaggatatgatccggagttgagtggcggtgttctaactccaggtaaagacagttcaaaatatcctcgtaagcgtgagtttggctttggattcaacattggattttaactaaaaagataagaaaatgaagaaatatataatactagcttttacaagtcttttggctttatcaagttgtgaaagttttttagacagatctcctttgtcagatttgtctccatcaagttactttaaagataaagctgaaatgaagaactggaatgcaggtatttatgatgcgtttcagagtgcactttccaagcgtcaggttctttttggtgatgtacgttcagataatgtaaccggtacatcctacgaagattctaagatttacatgaatgccttgatgcccaatatctcagaagccagttgggaaccttttttcacttgtatctccagatgtaatattggtattcaaaaatatccgacaattcccaatatcctagaatccgagtatgctccatatatcggacaatgttatgccatgcgtgcttatatgtatttttggggaacccgtacttggggtaaaatgccaataataacggaaccatgggatggatctctaaataccatcgctgttccccgttcttcattagaacaagtaaaagtacaaatattatctgatatagaaaaggctatcagttactttaaccaatctgatacaagtgataaaatttatttaggcaaagatgcaatgtacgctttactaacagaagtttacatgtggtataatgactatcaagatgccttaactgcttcagaacattttatcaaccataaaagtttgtcattatctaatggagaaattgaatggaaaaacatcttcaccaatcctagtagttcaaaagaagtaatctttgctatggcatgggattacgaaacagatggagctttaagtggctggccgcaacttttaggggcaagtaacacgaataatggttacagaatggcagaacccatttttaatgagtttatagatcggcttcgttcaggagaaggttctgatgcacgtttttggaatacaattgacactgtgaaagtatactataatgcctctcgtgttcctttgacatatgcaagttatacagctggagtagaaagcgtaaataaatgtatcaaatacagcaatattgatcctgaacgcgagtatgattcctctaatcaagtgtataaatcatatttttcagtaatgaacacaaccgacagcgagttttctctggtaatgatgcgtatggcaaatattatgttactgcgtgcagaagctttaaacaagttgaacagaggagatgaggcactgaatattgtcaatgatattcgtactcgtgtggggtacttgaaagatgcaaaattagaagtatccaatgttaataatgtaaatgaagtggaaaatattattctgcaagaaagacaattggaactttatggagaagggtatcgttggtttgatttaatgcgaaccggtcatttaatagaagtgatggaccctatctattccgcacgtcaggaagcagcagatgtgacagtaactggtttcggtaatgaaggcactaaatattggccaatttattatgctgaatttgaatcaaacaaggcactggttggagatcagaatccaccttatactgaacgttaaaaacaaactattaaaaaagagttaataatgaaactagaatattataaaaaagcattagccttgatggtaattcctttctttatagcaagctgtgaattattggggttagattatcaagattcatacgattacgattatagtgctggtatgccaagtaataaaatcgacatgtctgctttcgaatttatcaaatcccgtacagatatattttctttgttggaagaggctattttgtatgcaggagttgaaaatgagtttaaacaaagtggagtgacctacttattacctacgaatacagcattcaactcagagacgagtactgatttaagttattttcagacgcatcaactaacttatatagatgaggagactggggaacttgtctcttacgcacctataagtatgactgcctatcccaaagaacaagtgaaagaatttttgctttatcacattgtgaaaggaaaatatactttcactaatcttccggcagaaccaacttggtttgagacagtagctacagctgatacagctaaaataaatatgtatttattgaaagaccgtaaccccaacattgtattcaacaattttgatgggcattacaagtcttccatcaagccacgcacctccaatctttacaatgctgacggttcatatatgcatgtcatggatagttggttggatcgccctacaaaagaacaactaaatatgaaataacctaaaaagattacgattatgaaatatatttatcaatttttcattgttctactttgtgctttctcttttgcaagctgtggtgatgatgattttatcgaaatagattcgttaagtacagatggagatgaattctactgtaatcagaaagtgaaagtatggatgtgtgtacgttccagcgatttatggcatacgaattatgaatggagttgtgatgcgggttcattgacccaacctcaaggtttaaatgaaatgacctggaaagcgccaagcactccgggtacctacacgattacctgtcgagctagtattgggggagaatcacaagttcgttctcataagatgtatgtatctagttattattttgataaatttgagaaaactcctcattctttatctttacaaggtagtacaactggaacacttaaaaaagaatctaacggtaaccaatatctgcaagcaaaagtgaattccgccgcagaagtaactcgttatcttcgtcgtgcttttggagataatacgttatatactccgtttagtacccgcatgaaacttggttttgactctaatgtccctaatatgcaagaaattgtagttgggaaaaaaacaggaaaagcaacattggagtatcgttggaatttacgttccgacgcttccaacaatggttcttatattaatcagattcgtctgatatggtatccaggaaagctaaaaagtggagaagtgtatccggctgtacctaatgaagaacttacgatggaaggtaccacggattataatgtacagttaattgtccagtatacatctgccgcaggtaaaaaaactacgtataacgaatatcacaacctgaatacaatgaatacatttactaccaaactttatcagacggtatccatgtctgttgacgaaaatgaagcaatcattgttcatgtggctggtcaagaagtattaaagagtaatattttaaaagatgcacgtactgaaaactcctgtgaaggtcgtatgtctatcaataactgggagctttatatacccaatggcgatggtggtaaaaacattccgttagtatatatcgatgacgcttacgcctctaatacaggtattttagaataatattcattcatcaaaaagtatcttgggagttattgtatcctaagatacttttttaattcttgtaattatgaaaaaacgattatttcttgttttgtacacatcactttatgttgcaatggtctttggtcaagattttaagggagttattgttaatgccaagcaacgtcctttaaaaggaataaaagtatggaaaaaaaatactactgaaagtgtaaagacagataacatgggagtattctctttttccggtttacagcccacagatacattggtagtatctatttctaaaaaagaagaggcaattatccctattggtaagctatcccaagcttctcttaaactggaaaagaaatttttcattttattcgatgggcagaaagaagaaaaaagagaatataccaggatactccgtgcaagttataactcaaatgtattgacccgtgaacaaattcagaagttatcagccaatagcatttacgatctatttaagggtggagctattccgggggtaacagtgaatggagacaaaattacaattcgcggaggaagttcatttaatttggataatgagcctttatttgttgttgacggcactttatatgaaagtagcagtgaagtagatggtgtagtgtcaatcaatgatatagacaaggtagaaatacaaaaagatggtgcatcttatggcatgaaaggagctaacggtgttataattattactacaattaagaaatagcacataactactaaacacgcatgcactatgaaaaacaaccggataagatattacctgagtctatgggtgatactatttgttagcatctttacaagtaatgctcaacaaacagatactatttatatgaacaatattgtcagttcatttaaacaagttactaatttgccgcaagagaaagtctatctacataccgataaaccatattattttgcaggtgatactatttggttgaaagcatatttggtgaatgccattacccacttttccggaaatggcagtcactatgtgtatgtagagctcataaatcgcaagaataaagttcagcagcgtattaagattcggcaacgcgaagatattttttcaagttttatccctctttcaaaatcattggaggctggtgattattatctccgtgcatacacccattggatgttaaacgaaaaatccgactattattattccaaaaatctaaaagtctttgcctctcaatcttcgtttatatatccggaaataagatatgaactataataagaaaatcgaatatgattaactataattagcatagttatgcaattatcgcacttaaagaggctcgtcggggctgcctgctcagccccttgccgcatggcgttccctccgcaggagctttatggcttctcaggcttgaacccatctacatagagtttttcttgagtgacaatagcaaaggcttgccttataagtttgttagcgactgcaatgagcgctacttttcctggcttgcctttagatcgtaaccggtcaaaacatgccttgcattcagtattacatcgtaaagatgcaaaagccgccacataaagttggctccgcaaggaagaatcaccgttacgattgatgtgacctttgacattgactgacgtaccggattgttggtaagtaggtgacaagcccaagtaccgggtgagttgtttggcattatcaaaataggtgaagcctcccgtagccataattagtgcggctgccagcgtaacaccaatacctttgactgaagtaagcaaatccatctgtttcttgtattcactttgcgccagagaagccaattcttcttccaactctttgatttgtttttcaagaaagatgattgtcctttcaattgttttcttgcatttaggatcaaagaatggaagtgcctccatggaacctttcaagttcccagttgctacgagttgtttcttgagctgacgtatgaccgtccgcttttgctttaagacaagaatagtatcactacgcaacttgtaaggtgccggctgcatcttctcaccatacatggcgattaagcgagcgtctatttcatcagtcttggtgatggagagcataacacgggcaaagtttttaatctttagagggttctcaagactgacagctatacccgcttctgaaagcaggtaaactagtaaggaactataattaccggttgcttccaaaacacagtgatgttccgctacagaaatggtttggataaactcatgaatacctttgatagtattcttgaaagagtttgtcctactacctttagcagaagaataagcaactacgaaagtcgctttgctgacatcaattccaacgtaagtcatggtcttaatattttatattaaacatctatacatcttgagccatcattgcaaatgcggggtcaaagcccattgaactatccggtttctgatgtaaaagtgtggggactgaacatatcttacgatctacatgatcaatgagcaatcggccttattccacactctgatgttgaaactttatgcaaaaatataatgattaaataatatacaatgaacagaaagggaaaaaacgtatagcaactgtcaccttcaaaagacccgacaataccgtctatgcaggtaattacgtgcactatatggttcgtactaagccatacgaaaataagttccgtcagcaacagactaacaagaacggagagattcaaatagatatacctgaaaaagataaaatagagcaatacatctatgttgtattggaagataaacagttaaagcacaaacacacattttatgttccggatgcttttgactatcatgtcgatttttttccggaaggtggtaacttaatttcgggatgtacccaaaaagtgggtataaaagctatagacacaaatggaaattcagtagaagtgacgggcagcattttaaacagtaaaggtgataccattactcattttaagagtgcttatgcaggtatcggcagttttatgctacctatttcaataggtgaaaaatataaagcagtcgttagttctattacaggagatatgaagaaagaatttttactgcctgatccggaggccgacaaattctctttatccattaccgaacgtaacggcatcatacattacactatattacattctccccaagagaagttaccggataatttatacttgatagctcatgttcgtggttttctcctatttgtacaacccatacagaaaggacaaggagcggtcagcctgaaatccattcccgaagggatattaacccttactttattggatggaaattacgttccacacagtgaacgccttgtattcgttcgccaaaatcattcaacctggcagttagcctctgataaggcatcctatggttcgcgtttaccgatatctcttaatatccacctctccgatctgtcagggcaacctataaagggtgatttctctttaagcattacagacaactatgccatcagatgtgattctacagcagataatattctttctaatttgctgctgacgtcagatataaaaggatacatcgaaacacccggatattattttaaagataattctcagcgattgaaagcctgtctggataatttaatgataacacaagggtggagtcgttttaatgtagaagacattcttaaagaacagcaaaagaatcccaaatactttatggaaatcggacaaactatttccggtaaggtattagatattcgtaataagccactttctggaaaaactgtgaatgtttttgtcaataaacgtccttattcctcaacacagacagataatgacggagtatttattatagataagttaagttttgcggatacagccagagtcgaagcacaggtaatagaaaaaggaaaattctttcatgctaacattcggatagacagggattattttccggaagcagtaaatatccatccatacaaggatacaaaatatgagcaacagaacgaatatatagaagacatgcaatcaccttttgtcagagaagacggagtcttaatgctgcggcttccagaagtagtgattaatgccaggactttagtaaaagatcgtttttcctcctataaaatagatgatgaagagatgttgactcaacaagatgcgcgcacagcactcgatttagtcaagaatgtccccggattccgaattatagataatcgtccgtatataaatcctaaatactcccaacgtccggaacatctgatgtctaatgatataaataataggaatgctttgcgtcccaaagagaaaatcgattatggtcgtactgtgcgcttcatgctggataacaaaacgatcagtttcaatgctctttctctcatcaatgcggaagacatcgtaggagtgcacaaaattgatccggaagttgatgcagccgtcaatattactcaaaatctgaaatacttggaagaagcttataatgaagcatttgagagtggtgccaccttaggagaattggaagaactggaagtggacagacaactccagaaaatgaaggatggtactcaacgtatttccggtggatgtattgtgttaacctcacgtaccggcaatttagagataccgcgtacttcccaaggagacacggcattcctgctcggctttaatcggtataaatccttttatagccctaaatacgtaacagacgaagaacgcaaatcacttgtaccggataatcgtaccactatttactggcagcctcaactccgaaccgataaaagaggtaatgccagcgtacacttttacacagctgatcgtcccagctattatacaattattattgaaggtataacagataaaggtgtaccttgtcgctatgagcatttattaaaaagataagcagcttattttttattttaaatttgatatcatgaagcgtataaaattatttttagcactatcagtattggctattcttttatgtggaataagttcttgttcaaaagaagaaagtgataaaccggatactgaacagcccgaccccgaaccaactcctgagcctaccccggaaccagaaccgaacccagacccagaaccggatgactataaactgcagggaaatatgcaagccgcacaacaactcgttgtaaaagattattcggaaatccataagtatatgcgctcttatggatgggactattctgaacatcccaattcatctgataaagatcataaagacggagtgcattgcgaagttatatatgacgaaacgatacaacaatatgttttcaagtttatcagccatgccaatgctgatgtccttgacggtgaccgggggaaactggaagaccgccaacgtaatgaaatgaaaacacaaacgactgctgcctggtataaattgaatggtaactgggatgaatggcaacgccttgaatggaaattccgtattccgaaagatttcagaccttctacaagtttctgtcatattcaccaattaaaggcacaggagggcaataatggttctccattgataaccataactccccgctgcaatagtaatggcaataaccgtcgtgtacaagtgatccataccggtgatattagtgctactactaaaggaacaatcatagacaatctaccattgtctgattttgaagatgaatggatacaagtagaaacagagatgcactttacgcacgatggggcgttcaggattaagatgacacgtatcagtgatagtaaagtattagttgataaagcttttacaaatattgacctatggcggaagggagcgataagtattcgaaataaattcggcatttatcgtagctttggaagaaagatggaaagtactgatgatcgtcctactaatggaataaaggatgagactttgcaactggcagatttcaaggtttatgagaaaaatacaaatcccaagcctgaaagccacgattagggtgatttattaaaaatgtgcgcgaaattactgacgacgggaaagcatgtcgatacgtaaaacagataagataaattgctaataaacggaggaggcggaggttgatagattgtatctcttttaaggaacaatatgatcacgaggttgtgtcaaaatgctggcacaacctctttttatgcgcaaagcccagactttcccaagcccgggctttgttataacccaaaatttttgtaactttaggcataaagtttttcgttatggcaaagttacattttcgtccttacattcccaaccaaaccgttctttttccacaaagaattgatgaaaacatagctgcggacgatcctgtccgcatagtcaatgcagttgttgataatcttaatcttgataatttcaagaagctttataaagaagcggggcgctcagcttatcatcctaaaatgatgcttaaggtaattatctacgcttacatgaataatatctattcctgccgtaaaatagagaagcttcttttgcgtgatatccattatatctggcttgccggtcatgagcatccggatttcataaccatcaaccgtttccgtaaccgtgtaaaggaggagataaacaacgtcttcacgcagttggttcttgtcctagctgacaagggtttcatcagtcttgacgtagagtatatcgacggcaccaagattgagtccaaggccaacaaatatacttttgtctggcgcaaaacagtcgaaaagaaccgtacaaggttgctgaataagattcgcatccttctggagcaggtggatgaagccattgtgcaggagaactctgtaaaagacacatccgtggagttgactcccgccatgctctctaatatagtggatgaactcaaagaagtgctggaacaacagcctgcaacacaggacaaggaacaaaagaaagctctgcgtgaaaaaaagaaacaggtcagagaacttgaagggtatcgtgacaagctgatggaatacgacaatcaccttgaagtccttggagaacgtaattcctattccaagaccgatcctgatgccacattcatgcgtatgaaagaagacgccatgaagaacgggcagaccaagcccgggtataatttacaaacaggcactgaaaaccagttcatcatagacttccggctgtttcccaaccccaccgatacgctgaccctgatccctttcttccactccttccagcaccgctataaccgcttaccgggtatcggtgtggcagactccggttacggctcggaagaaaattaccggttcatgcaggaaaacgggatagaggcctttgtcaagtacaactacttccataaagagcagcgtccccgttatactcccaacccgttccatgcggaaagtctccattacaatgcgggggaggattattacgtttgtacgatggggcaacacatgaaccgcataggaaccagacgtgacaaaacagcgagcggatacatcaccgaaagtgcccggtacaaagcacaaagatgcgaaggctgtcctttgcgtggaagttgttttaaagcacaggggaaccgtattatagaagtcaaccaccggttaaaccaatataaacggcaggcacgggaaaggttactctcagaagaaggaatcaggcatagaggcaggcggtgtatagaaccggaagctgttttcggacaaatgaaatacaacatggcatacaggaggttccggcatgtgggagaagacaaggtgacaatggactttgccttctttgccatagcttttaatatcaaaaagatgtgtgcaagactgagaaaagcaggaaaggagttcattacacttgctaaatctatatttattgggctatttataactcgatacaacgggaatatagcaacttgttaccaaatgaatgagaaaaaagcggcgtagacaaaaggaaatatagcaggactgtaaatcatcaaaaaaggttgtgccaacgttttgacacaacctctgcccagagggcggggtggtaggtaaagcgaaaaatacctatgaaccatataaataaggaattattttctcacctaccacctccccccttcgggtactcctcctcccaggaggaggagaattgagatagtattgctcagcatttgattcattaccatcccgttatgaatcagctacaggctacgagctacaagctacaagtacctttcggaatatagcgcaactacttgtagcttgtagccggtagctcgtaacttttccgttatgagttaagccgacgctcgaaccttatccattaatattcatatccaatctgaggcattatttgagataccctcagtactatgcgaggtacccacttgttaaatttctaaaatacaaagcattacaacctcaaaaaaatcatctttttccgagaaattaaaatcttcggacaaaaatgggcggtaatttatctttaaacttttaattggctgtacagatgcctcctgcacttatctatccggcatgcattagagattcaccttcattgctgcaccttccgctatattcttcttcaacacgggtttaccacctttcagaatttctacatgcagcttctttcctgcacgacgtacccgaatatcaaactccgaattgaaagcacgtacacgattcagattcatatactcccactcctgtggtaaacggggggtcatctcgaaactgcgcaatcctgtgggtcggatgccgaacagaccttcggtatagatacggcaatacaatccgctttcagctgaaagatgacgctgatctccttcgggccacgcttcaatggcataaggcacatgatcgcccaacaaacggcgatgtgaatacttcttgaggaagttcatacctttctccacttctccggcagcaatggtgccacgcagagcatagagggtactacggtcccagaaagtttcagtaccggcttgcgtcaataatccgtcgtccgtccagaggcgaggcgaaaagagagcatcgatagtgccttgtgcgcgagtgtagatacccataacaagaggcatacaaatccaggaacgcaggatatcattaccttcataatagcggtaactgtggaaacattctatctcataaccaaaatgtttttctatggctttctctaaagcattcgcttgattacgatacatgttcaactgctttgccgatactcccaattcacgccccagcataacggctgaacgcaaagcatcgtagtaaagcgtagaggtacagaggtttgcatcaccagccgggaagcggttctccaattcatctgaattcgatgcaaccacgccggcaggagttagtttacggttacaatactccagacaccactcaatcagaggccacaattcacgcgcttccgccttatctccacgagccaacgcatagcgtgcagcaccgtaagcaatcatcgcaccgtctcccctatctttggcaccatgccagaagctgacaccttcggagatgatggaactcggaataggtttatactccggattcatatagcgggcaaagtggcggaaagagttcaatgcagactcatcaccgatctcataccccaggaaagggaagaaggggttgatatactctgcctggtcgttagcccagacagccgcataataggcttcaccaccgggaccatgcatcaatccacctttcgtgcggtagatactttcagcaccacgcagtttggcaaaggcaaacatgcgattgagcacgggatcgggggtatccaaaaccagattgctccaccactgactgataagcgcttcacgcgcggcacgttcactaagaatattgatgtgtgaaagaccgacattgtttcgtccggacgaggcatctgccagtttccttccggaaaagactgcatagaactcaagcgtctctcccggtttcaaaacaaagacaccacttttggaaagagcggcttcgatgcaataagcaccatatacaccggcttcctcagaagtagtatatgttacgttccactcaggcactcgcagcgttatctgattcggactgctattcttgaaagtatattcctcacaatagcgcgcggcattggtggagggatagagtacacgcgtcaattgtacggcatctttcagttccttacgccggtaaatatagccgaaactactttccacacacataatgccattgaaggtaacatcgcgtacttcttcattcagcaaggtttgatcgtccactgttaccaaagcaggaatattcacatcgaaacgttgcttcagattgttctgtgtcttattgggatgcatgcgaagcatagggaaaacaagacttcggttcagatggaaacgcttttgtgcatccacgccgtaacgaaggacaacggaaagttgttgcccactcatttccagatgatcgtcatgtggaatattatcattgatattccagcgaatggctccatcatcctgaatagtccaacgatctttcggttgtgcaatggccagcgaaccggcaaagatgaaagagaaaagtaataaggttcttctcaagttcataaggttattgtttttaattgttagctactaatatcaatactgcactctcaaactgggtattcaatggattctccagacctttttccatcagttccgctcccgtaaataccttgccattggcagggaaacgggaagtcactccctttgccagacttacttcctccacacgatattttttatgagcatccaggccacccagcattacccggggttcattaccatctttagtctggtagaagtaaacgactgccttttgtttatctgttgaaacataactcaaagaggccaatggggactcataaggagaaaccaggcgataaagttcaccatgcatcaccaacggacggatacgctctttgtacaatttcacagcatcggcaatctgcgcgcgttcttcagccgtagccttatccaatgccaggtctattccgaatgcaccgctcaatgccacatcgattgccatcttcaaatgacgcttacccatacgagtcacatgagcagaaatcgtatttgcagggaagaaatgtgagaagccccattgtatcttgatacgccccaacgggtctgtgttatcactgggccagaaggaatggaaatagggcattgcaccatagtccacacgtcccgatccaccggcacaaagcatggccatcacattggggaagcctttggcaaagcgatccatcagacggtaaagcgcccagttatagtctatccagagatgactttgatcggcaggctgcaaataagaagatccgggttgggtgatgtaacggttacagtcccacttcacataagtgatatccgggttaggtcgcaaggttttgtcgataatatcccattcaaaagcctgtacttcggggcgggtgaggtccagtatctcctgatggcgacccaatatcggttcacgtttggattgagtaatgatccaatcgggatgtttctgataaagttcactctgaggattcaccatctcgggttccagccagataccgaagccaactttacgcttcaatgcttctttggcaatatatgacagccccttgggtaacttcttggtagaagggtcccaatctcccagaccgtgcttgtcatcgtcacgggagtaaggtccattaccgaaccagccatcatccaataagaatagttcagcacccacctggcgggcaccatcaaagagttgcttcaagcggtcttcatcaaaatcgcagtgcgtagcttcccagttattcagcaatacaggacggtctttctctgcatcgcggatggcatttgccatagcccaacgatggaaacgacggctggcttctcccttaccctgcttactatacgtatagagaatggcgggtgtagtaaatgtgccgccacgctccagattgtactgtgagcccaaaggattcataccggtcagcaaacgcaggttcttgttccagtctacatcgaaagcaaactggaaactgccgctccaacgcaaagaagcagccagtacttcaccttcattctctttagccggtccgttcagggaaaggataaaagaaggaatacgcatctgatgtgctcgaatgcctaatttggaatccagaatcttgactccttccgaaaggcgttcttcattgagggttgcttcgcgcttatagttaccggagaattgagtgagccagtattccttcgcctttaccaccggggcagcagaagcaaaacgatgcagaatgactttacctttctcattatgcgtaactgtattccatatctccatcatgctattgtctgcatagcatttgatatagatatctacggtgaaaggataggcagggtctttcagtgaaataacggtttgttcaatacccggtgccaaggcttccgtacgatgtccggcgtagtgaagctccgtagatgtatttccatctacgtgagttgcctggatagccggttctgtcaagacaccgtttccataaggaggaagaaattcccattcacgtgagggtatcttagcgggaggctctacttcacgggcagcatctccaaagcccaattggtaaaggcgattgtccgtacccaccataaaggtcagtttcagttcgccggatgtaacggtgaagagcttctttacatttggatggtccgctgcatgccccgtgaggagaaggcagagaaataaacaggtcgtcaatatattcttcataatcttatcattcttttgtcataaacttccaggtaacattggcaatgctgttcggtttccccttttcagctttggatatagcacctttcagcttgcctttcttatcgcgtgtcacagtgatatcacgccaggaataggcgcccttctcgtaatcgtatgtttcaccgtcatcatcatacagccggtaagcaccatctgcttttccataatgacggatttccagattcaccttctctcctgctttcggtgcatgtaggcgagcctccataaatggcagaatagccccatcctttacatataccggaatacggtccaagcccggtgtaacagtaatcttctcgccattgcccacatatttacctgtatagaaatcgtaccagtctcccttaggcaataccaccgtacgctctttctggcctttgaacatgggagctaccaacagatattcaccagccatatactggtccttaatttctttggaaaccgcttccaggtaagggttatcttccagatttgcatccgacagtttcgctgtagttccttgttcagggttgaaacccggttccagattcatggcacggaacggaggaataccatcaaaatgatagcgtgcaaattcactataccagtaaggcatcatctgcatgcgcagcatagcatactcttttatttgattctctacttcggggaaagtccaaggtttcgtaccgcttgcccaagcattaatcattgccatcggtgagaatactacagactggaaacgacgcaaccagtcttccgatgaactggaactacgtacttccggagtccacaatacaccactaaagcctgaattaatcaaagcagtaataaagtccggatggctgtaatagtcattataaatcacataggggaaagaagttgcaccggcattcgatgcacgaaccaatccgaaggtacgttgattacgcttcttgtacaattccgcagtagtacgttgtacccacaaaccataagtctggcgcatctgctcagcagcaattccactggggaaagtagctacatccggccagacataacggtcgtatccgtctacttcatccactttataaccgctgacaccgatattcacgtgttcctgttccagcttatccatccagattttgcgggccttctcacctgccaagtcgggcacaatgccgcaccatacggtgtgtgaaccacttaccggatacatttccttatatatctttgaatcgggagatacgtatgggtttgtccataagttgatgcgtactcctttagccaacatatctttcacaaagccggcgggatcaggatagcgggtagcatcccactcaaaagtacaaggatacgctttgctttgccaacccggttccagtccgatgaagtccaacgggaaaccacgttgttcaaattcatccgcttcattcttcacgtcttcagctgtatagagcttctttgtacgttgcgtaaagcccagcccccaacgcggaggtaatgtacctcctccacagagcaggttataacgacggacaacatccataggagtaggcccggcaaacagataaatttctgcacccggagcaggaaccaagatagaaacggcatccgaataaggcgccgatgtccaggtcttatccatattacggtctttagccaccggagcattcggactgtccttacgtgcgccgctacctgcatatactgtcagataacgtgccgaattaatcagtactccataaccggaactggaaatataaaaggggacaggagcatgtgtacgcccgttatcacgtccaccataatggtctacatgcaggttcaggatcttgccacgctggtgtaccgtctgaaagttcagtccaaagccgtacaactgttccttgcgttgcaaaggaatgcggagacttgttttaccatcctgtatggaacccacaatttcattcgccaattcaggcaatgtcacctctggcaagcgggcaaaaccttccttttgcggcgtaacaccggccacacccaataatgaatattcttcaggagtgcctaccacacctttccagacgccgggctccacttgctgccatgcaatctgtgctttggcaggacatagcatcaacagggccatcgcccctacaatcaaaattttcttcattctttccattttgttacaacagcgttattatcatcgaatcataccggcaaagccaccgttcggaagaactttcacttttaccgtcccatttgtattttctacaggcatatagtcaaaactatctttatcttttccatctataatcatagtgaatgatttaccttcacatccggcgggcaaagtaaattctatttcacgttcctcttccttaccgctgatgccaccgatataccatacatcaccggaacgacgtgccacaacagcataatcagccggatagccggccaacaggaggctctcgtcccaggcagcgggtacttctttcaggaattgtttgggttgttccggcaaagaaagataagactccgccttatcagcaaaacattgaaaaccggattcaaagactactgccagagccaactgatgccccatagttgtcttacgtatagcaggtaccccttggcgtactttatcagagaatgtcaccggagtatagtccatagaaccgactagattgcgtgtgaaaggtacagtagcattatgtttggccgcctggtcgcaacgttcctgacgtcccagagtttctgcaccccggatagcttccgtggtcagcatattcggatacgtacgttcaaagccacggggtagagtggcaccatgaagatctaccagcaaatgattatctgccgcatctttcaataaagccggataaagttgaataatacgttgtttgtctgtatcaaaaaaatcgaccttgattcctttcactcctacttcactgatgcgtttcatttctgcacgacgtaattccggatcactcatcagacgatgtgtcggtatagaatccttttcacgtcctgcaccggaatggtaccataaccagacacccacccccttctgctgtgcgtatttcacgacatcttccatagtgccaccgttgcccatgttttgccagccggcatcaatcagcatatattcccaacccatttcagcgctaagatccacatatttcaactgtgctttataatcacggggagtaccaccattagaccaccaactccaggatgcgcgtcctgcctttatccaggattcatcgttcactacagacgcgggattcaggtgtgaaatcatttgtgtctggaatatagtattcagatcatctcctatgataatggcacgccagggagtgaaccacggcaattccgataccggttctactgcatccggcacaattggttcatccgcctccggaaaacggattttataagcattatcggttccggcattatcaatatgagtagcaggatatgagccatccagatgggcttccgttatcatcatccagactccgttggtgttgaacagcatagggaatgcccaaccacgtccatgtccacattccgaacggatatctatttcactccggcaatattgttcatagctcggtttgtgacgatcgttccagtcatacgggtgtatccacgcttttccatttacgggtacggcaaattccgtatgttcggcctggatagtgtgcatttgtccatcctctccgggtagttcatagcggaaagccactccgtcattatatacccttacgatcaaattaaactgcttatcctctttagtacggaaagtaaaagtctgttcacggcactcatccgtagtattcatcttcttaccggattttagctgataagcattagagatatctctcacagcagaagcggaaacaaattgagcgtcttttccatattcacaattatccataaccagtcctaaaagagatttctccatcgccactccatctttataaaagacagagtaactaagcattgtaccgccattttcttgtttattctccaaagcaaagcggatgttgctgtctttagataccagctcccatgcatcaggagccgtacaagaagtcattaatactgcaaacagcaacaatgctgtattcaatagttttttcatggtatttatcatttatatatttgtatatccccatcttcacaaataatctccgggcgagcatcggggttcttcaactcaaacgtaacattcttcagtttcaaccctttcacgtggcgtgcccatactccgtatgccggaatcttaggaccgaaagtctttacctccgggtatttatcgatagcttcaggtacctgagacaaggcatcctcaggagttcctgtacccaataaacgaatatgaatattttccaaagtcaggtttgtaatataatgtcccggaatacccgtaatcagaataccggaaggaggcgtcagttgagccttatcggcagccaccgcttttacattacggattatcacattttcaaagacaccgataggttgctgggtatcttcctgtttacggaatacactcagacgggcacccaaacgaaacagcatcggcgtacgtacttcgtccattgtgatatcagagatttccacattacgtaaatgggctccatctacggagaataacttaatacctccattcttagtgtcgtaaatatgacaattgctgatcttgatgttctcaaatcctgccatagattctgttcccatcttgatacctgcctgattacttttcaacttcatgtccgtaacaatgatgtcatcacatcccattttactggcagtagtcttgaagcaaagagcatcgtcaccactgacaatatcacaattactaatgcgtacatgttggcaaccatcaatattaattccatcgttgtgagctactccaaagctacgtatcgtcacattatggatattcacattccgacattggaaataatgggaagtccaggcacctgcatattttaaagtaactccttccacgcgtacaccttcgcaacgcacccagcgaagcaagaaaggacgcaatccccaacgctgtccttccggacgggtatctacttttatatgccgttctttcaaagccgaaccttgcccatcgatagcaccttcgccctccaatgccacatttttagcatccaccgctaccagcaatgcccaaccgacatcgatacccaagccttccgtaaaaggatcaaggttatcataagctttataatcggtagtacccagaataagtgcatctttctccaaatgcaaagttacattatcttttagcacgatagtagccgacaaataggttccggcaggcacaagcaccgttccaccacctgctttatgacaagcatcaattgctttctgaatggcaggtgagtccatctttttgccatttccccgcgcaccgtacttctttacattaaatgtttcagcctgcaacgtaaacggcagtacaagcaacagtaacaacagtaataaattatttttcgttttcatggttagtatatgtaagttaactatttaatttcctttgcaatattcactgtatatatcctattacttcgccgcccggggtgttctaaacgcaactcattggtaccttttgccaacgctacaggaaacacaaactctccacgtttttcaccaaatgtagccaaataaccgatattctcactaattttctcaccattaatatataagtaagaaggaaccggattgccacccgcataagatactaccaaataatattcacctttatgtggaatgttcactttccaactcacacttccctctgaacttcctttctcacctttgaattctactgaaccatcctcattcaaggatgcagatccctgtctttccatatctttagcctgacatatctctatattttccaagcgacgtaccactacacgttgtgaagctgttacctttccatctaccaaagtctccagattaaaatcagtcgttttagagatagataaaggaatgatgccttctgcatcttccaaacgtttaccattcaatcgcacttcctctgcatgggatgttttataatgcaaggcattttcatctgcgtagaagtattctattgccggacgtttttcattcaacggaactctgtataattcgattcctttacctgtacccagattacggctgtacattcggtgtgttggattattccaatgctcatgcactcccaagctaccttgttcttttccgatataagctatccccgaaggaggattccctatatttgccgcctcatgaagaaaattgtcggcattggcacataaaggaagttccgaataaatgaaatcaagtaccactgattcgatagcgacctgatcattggaagccaggaaactggaagtccagccattattgaacggagaaagttggaaacgtaccgctttcccattatgcttgggatttacgtacatagcatccaccagatacaccaaggtatttccacctatgcgctcgtgagccatcagatcgacaatgctattataagtgcccataccacggaaagaagaccaatcacgaatggaaagatgcaagggcggtacattgcctatggaaccgaactgattcttaccggtagcagttatagctgtctgtccggcactgtcccgccatttatcggtcggttcagagtgtcttttcatcaatgccatgttaatcatatagtcggcttcgtaagccgcacgtgccaaacttctggcaccggcatcggtaatctcactggaataacgaattacatcgggaacaaatcctccccaattctgataattgacatttggataaaccggctgcacataatcgtaaacagccgaaatgccccgacgctgtgcatcatataccgtaatacagttctggggaaccttcatgatatctaccaattgatgcaacaaagaatacacagactgtggagtagcatcaatgatattagttccaccattgtcattcagattgattttgatagcaatcttctcacctttcttatactttactgcacctttacctttcttataattaaaagttctgaacaattcatcccatgccttatcaatcgtattctggcgagtcagtgcaataatcaccccctccatcatatcatcgacacgtgtctgactattattatccggatccgaataaagtcctctttttccatcccaggcagccgccttcggatcatatgcccatgccacccgccccggatgaattcctttggctactcccatcggagtgttgggggcatcaataggcacaaaacgtcccatatcagtaccattatcaatctgctttcgaatgacctgtcccatcagagaattatccactgacattatatataatgtacccgataataatataccgaccgccaatatggacaaccccatataaaaccgacgggaatgccacaagagtttgaaacgtttccacgtaccaaatccaaccaatgtgctactgataaaagctacgaaagagaaagcgataggagcagcgatttgctgacagggatagtctattctggaaggtttgggtacaacacgtatcaaaaaccaaatcagagctgctaacccgaacagaggaaagcaaatcttcaaaacaacatttttcttgttgattccaacaatccgtccactcttcggacaagtcttaaagaaccatttttttatttttgtattcatttcattagatatataaggattatctttcttggttacaaaaataggtagataaaaaagagacgattatcagtattccatcaaatacttgaaaaatcgtctcaaccaagcagactctatcttatttctgtaaatagactaactctattccaatgtctttccccatattgcggctatattttttttcttccggattattccaatgttccaaaactccgaggctgccaactcctgtgccatctctttccggatcatagaaagtggcggacaacggacggtctgccagagccgcctccaccagatacatatcgcaataatccacatcggccatacgcggaaactctgaacttagaaagtcaatgcccactgcatcaatagctaccggatcctgagaagccagcaatgagcaaggccaatttccattaaacggtgacatcttccatttacctgaaggctccccattcaccttttccgaaccgtacaggccatctattagaaagagcattgtcttttgtcccagatctttatgtgcgatataatcggtaaaggtcatatagcgcggtttcccaccacggtcctgattgaaattgttatgctgatttttacggaagtcccggttgatgtccgttactccataccagtttttcgcacagagtgttaccccctgaccgccatgtcctttcagtaatgccatatttatcaggtaatcagcctcaagtgcacagtttgccaatcctctcgccaaacgaccattatcagctgaatatggaatggcatctgccgtataagtcgattgggtacgcccgtttcctccttcattatccagatacacaacaccgggaaattcggcatgacatttatcataaagagctttcgtaataaaacggctggcatcaaatactgtgatttgctcctgaggtactccgccgtcattcaccaaactacgaagcaaggcaagcgtcagatgcggagaagcattcaactgttcacaatcttcatgggagaaagtattattctgattaatcttgatagcaatcctttctcctttcttatatccacgttttcctctaccatgctgctgattgaaataaagaaaaagagatttccaagccgccttttctttcttttctccggtcaaagacaagagagactggtttagaagccagtcggcatctgcctgattattccagcgatcttcaaaccaaaaaccgtctcctttctcccatgtagcggcacccggtgcatgagtccataccacccgtcccggataaatacctttcgcctctcctaccggattattctttccccatgccatacggggttctctcaccggaagaacagtttgagccaacagctcagtactgttttctaccaacatcaaagtcccgaagaaacaaagacccgcaaaagcaacgactcctatcactactttccggttacggaatgcctcgcgcaacttacgcaggctcacccaaactcccgtgaacgagagtaagtacatgacaaatgcggacatcaatggtgctgctgtctgcatacatggataactggcacgggaaggtttcggaataacccgtaccaaaaaccagatagtggaaaaaagaccgagtccccaaaagaggaacattcgcatccctctggaggaaaactccttcttctcgaccttttctttaaaatataaatagatacgcttcatattacttgataataatctctttactacgcattgatttcacattttctttatccgtaacacctgcttttacctgtagattcttaatctcagcaccaatcacatcatccagtactacggcataacgtccatctttctgttcagcactaatactacagttatccagaacaaagtctttcacatgacgcgcccagaaaccaaaagaaggttgtattttcaaatcacctacattataacgtcctaccccgatttcaggcggatacgcttctgcatcttccaccggatgaccgcctttcacaagcaaattcacatcatggaactgtacattcttaatataccctgtatgctggctattcggcaaacggaatgtcagtcctccttctacaacttccgtatccggcagtttgaaacctgcgataatgggagttgccgtactttgagaaccatcgtatgccttccagcgatctccccggaaagaacttccaccataaacctcatcaatgtctactccacaaatcacaatattctccacctgcccgatatcagagttagttaccaacaattccttacgtacatttccattttccgtgaaagtaaaaggagcgacattggcacccaacacacggcctctgttggatatagatatgaagaacggggcacgcgtacgatgcatcaccgaacgggaatgtatcgctcctgtctttccactattcaaatagacattttttatatgtccaccatcattagtagatatggagaaacctgctttattagcacccagtacataaatattatccacatataaatcctgaatatcatccgctgtttccgaacctatctggaacaggttacaattggtatctccaactatattgcgtaccatatagttacgtgccggacgggtaaaacctaatgaacaatccgaacccggtttcacaatatcatccgaactgacacgcgagtaaatgttcgtcaccgttacgtcattgcacgccataaagtcgtagatatcacgagcattccgggtattatgtttggcaaaataggtatcatgcacatgaataccatcagtacctgtagccaacaaaacaaaatgccctccctgatctatatgcagcatattgctgacatcataattcttccgattatccgtatctatatagtagggctcatctttttgtggatcataccacatatctttacctatattccagcctccaatttcaatattggtacaaagtttcaaagagaacattttgtcgcaacgtttctcgggagcattattcattactttatcagaagtaaccagattaccattacccgtgatacgacctgtacccacaatcttcacattatcaacacgttctccaaagaacattgcattatggaaaaatgtatgtcccacatcctgcttcgtcagatagttttccggatcggcataagggcgaggatcggtaggagaaagtcccgaacggtaagcccggtcactaaaccaggtcgtttccggcacatcaccacccggaagtccctgaatggtggcatccgcatccaaatgcagccagacattgctcaacagatgaaccgtcctcacattataggtacctgccgtgaatcgcagaatacccccacccaacttattcatctctttaatagctttgttaatggtttccgtatcgtctgctattccatctccttttactcctgccgtcttaatatcctgcaaaccggaatagaaccaagcaatatttgattctccctgattatcacctccttttacaagcagtttaaaagcatacagttgattaggattcagccgaccggcagcagcgaaatcatcgtccggcaatatcgctgttcttacaggtttccaggttcttcccttatcctcagacaataacaaagtcacagactccgcattacgaggagctgtccagtagaaagaagtgaaagataaatcccaattctttttatatgtaaatgcctgcaagggagtacgggtaaaatcggagacagtcgtcactccttcaaaagttgcagtagcaaccggactatgcagaacttccggctgagaggttatataatcagcctcaaatgtataattacctttttccggtattactactccgcgaaaacaaagacggatatcagggccgttagagggacggaaatccaaatctttaaagattaacagggtaccttttttcccatctttacgaatttccacatctccaacctttttataagaatagttagttccggttcttccgatagattgtttgtgcaaatcacgaagaatcacttctccacgacctattacatttaccgttgtattgtccaatgttacatcaatcccttccggcacacggatagtgacagtagtcatcggactgcgttgtccggcataaaaatcaagtgtcagacttcccgcagtctttatcgtgaatgcagtacggtccaactttatcacaggcggcaatgcccctttacatacccctaccagcaaacgctttttagaagttgattgcaaataatctccatgagccggaaagccttctgttttctcctgtccggcagaagtaaaaagacgataaacgcccgaaccggaatgagccaattgctctttcagagcttcaactgacggcaaggtagaacttaagccctcattctcaggagtatctacagtatagcgataagtagagccttcgaataataataaagagtcacgagtcagctgccagggatacaattcccctgcctgaatgcttgctcctgccactcccagcaacagagacaaaagaaaagtttttgataatatagacctcatatccaatagtgtatttctcataaatcagcgattcgtatcgatatggttaacattttctttcaacgccttataccatgtcggaccggcagtaaagatacaggcatctatccgttctttttcctcttggttcaaaccgtcaggcatatcaaccggcttaaaaccttctctcacctgttcataagggacactcgaaagtgattttttatcagaaaaggcccactcattatccagaaacaagaaaccgggaagtacttcatccgcccttactattttcaaatcaggagtttgtcctgtaaagagattatgggcaaaacgaacattacggggcatcttttctccgcgacctgatcccaactccaaagaactattcagaaaagtattataagcgatatccacattctctacccgatggtatgaagttaacggttcttgcttcacatccgtttctgccgtaggacgttcatagactcctacacgtaccaacaatccgaatgaccttacatctttaatataattatcgtaaaccgtatgtccctggttaataatacgaataccggcggttccacgcagattatgtcctataaatgtattcgactctatcacattataatgcccatgacgacaaaccaatccaccggcggattcataaaacaagttcctgcgcaatacattatgacaggatttcacagaaataatctcattttctccactacatctgaaaaagacattatcctcgacaatcgtacgtgactccaattgggaagaccaggaatgcccgatacgaataatttctgctccattgccaccgtaaggctgacgttcaccaaagaaattatgatctatcaaatgattattcaagtggttatcagcactcagccacacctgcaacaccagtccgcctactcttttattagcaaagtaacaatggtctatccggttattagttccccgtaatccgacccaatattcatctccttcattcggtcgttcacctttctgaggatcgttgcactcatcaatcacacaacgagtcatccgacaataagaagcatacacacctttttctccttgaaaatcaatcatatcatgccctatggcccatgccttataaaagagcaagtcttccagttgcaaatactctccatatatcttcagccttaacttaccggaaataacagcctttccgggattctcagcccgccagacaatcggtttaccggaaacccctttacctgtaaaatgtatttcttccagattatgatacgttccgtctttcagtacgacggcatcccccggctgcaaatttccactacccagcaactgtttcattgctggaacatctttcggtgaaaatgtatactctttggcattagcaaagagtgacactgttaaaagcaaaagaacacaaagttttttcatcatgttttccgattagaattaaaaatcacagagcaaatatagatgattaaaacatgaacggaaatagcctcctccccttcggaagtagtttgagaagataattcaaaagaatggtacgtttttataaaccagaagtgcagatatacaaaaatcgtccccttacattgtgattacaacgtaaggggacgaccctattctaaatcgaaattatttatttcttagccggagaagaatatcttgcattcaatccgtctacgatttcttttgtaatattatagatgctgtcagcatacaacaggttatcaaaaccggtattactgataatcatgctgtatccctttgtcttattatactctttcaggaaagcattgatagaatcacgcaattgcaagctgttcttttcgttttcactcatcaactctgactgcaatttgttactcaaagcctgcaaatcttgttccagtttagcaatacgattgtattcctgctgagctctttccggagaaagatacgcattattctgatactttgtttggaattcctgtttctgcttatccaattcccgagctttctggtttatcgtcatgcgaacattctcactctttttgaccataccttcattcagatcaacgcagaaattatattgtgccagaagcgtgtctatttcaacataagcaatcttcattccagtaagttcacctgaagcttgtcctgacgtagttgccgtttgattatcagctttacctgtacactgagaaaataaaacgataagtgcaagggcagccaaaccgtttacgaggtagttcaatctcttcataacttgtaaaaaatatagttttaaaattattaattcatactatcatttaaggctttttccaattcgtcaatggagaaacggggtttcttctgtgcttcccggtcctgcgactgggcacacccaatacctctctcccgcattgctttattaccgctgacgtgcccgttcgggaactttccgcctttcacaaaaaagacttttacacctaataatgcaatgcaaatagcaactattaacaaacttatcaatactgtatcgagcatttctactatttttgtaatacgaaaatagactgcatttcagcaaaatgaaaataaaattttcttttgcattcaatttgctctatttttgtgggtgcaaatatagggctttgtatggactaacccactttttttaccataaaaaaagagaaacggtaataaaatagccaattgatttaaccatatttagcaataagaggttaaatacgaacattcataaaggaattaatatggaaaagaatgaactgaaaccggcaggcgtttttcattatttcgatgaaatctgccaagtgccgcgtccttcgaagaaggaagagaaaatgattgcttatctgaaagcattcggtgaaaaacataagttggaaacactggttgacgaagccggcaacgtcctcatcaaaaagcccgctacaccgggtatggagaaccgtaagaccgtagtgctgcaatctcacatcgacatggtgtgcgaaaagaacaacgatgtgcagcacgacttcctcaccgacccgatagaaaccgtaattgaaggggaatggctgaaagccaaaggtacaacgctaggagccgacaacggtatcggtgtagctacagaactggctatccttgcagacgacagcattcagcacggacctctggaatgtctgtttacggtagacgaagaaaccggactaacaggtgccttcgccctaaaagaaggtttcatgaacggtgatattctgttgaacctcgactcggaagatgagggagaactctttatcggctgcgcaggaggtatagactccgttgcagagtttacatataaagaggtagacgtacctgccggatacttctgctgcaaggtgcaagtgaaaggattgaaaggcggacactccggtggagatatccatttgggactcggtaatgccaataagatattgaaccgtttcctgagtcagactttccagaagtatgatatgtacttgtgtgaaatagacggtggtaatctgcgcaacgccattgcacgcgaagcacacgcagttatcgctataccggaagactacaagcatgacttgcgtgccgatctgaatatttttgcggctgaagtacaagctgagtatgccgtagtcgatccgggactgcaactcatcttagaatcggaaaatacccgtacgaaagccatcgacaaagatactacgaagcgtctgctgcaaagcctctacgcttgtcctcacggggtgtatgctatgagccaggacattcccggactggtagaaacgtctacaaaccttgcatccgtcaagatgaagccgggcaacattatccgcatcgaaaccagccaacgcagttctaccgcctcatccaagcaagatatagccaatatggtacgtaccgtattcgatatgggcggtgccaaagttaccttcggtgacggctatccgggttggaaacctaatccacactctgaaatactggaaattgctgtcgagtcatacaaacgcttattcggtgtagatgccaaggtgaaagctatccatgccggactggaatgcggtctgttcctcgataagtacccggcactggatatgatttcctttggtcctactttgcagggtgtgcactctcccgatgagcggatgctgattcctacggtagataagttctggaaacacctgctggatatcctggctaatgttcccgtaaagaaataactcacatcccttattcctcttatacggatggttaaaggggggtatgtaaaagaggttgtgtcaaaatgctggcacaccctctttttatgcgcaaagcccagactttctcaagcccgggctttgttattacccaaaatttttgtaactttaggcataaagtttttcgttatggcaaagttacattttcgtccttacattcccaaccaaaccgttctttttccacaaagaattgatgaaaacatagctgcggacgatcctgtccgcatagtcaatgcagttgttgataatcttaatcttgataatttcaagaagctttataaagaagcggggcgctcagcttatcatcctaaaatgatgcttaaggtaattatctacgcttacatgaataatatctattcctgccgtaaaatagagaagcttcttttgcgtgatatccattatatctggcttgccggtcatgagcatccggatttcataaccatcaaccgtttccgtaaccgtgtaaaggaggagataaacaacgtcttcacgcagttggttcttgtcctagctgacaagggtttcatcagtcttgacgtagagtatatcgacggcaccaagattgagtccaaggccaacaaatatacttttgtctggcgcaaaacagtcgaaaagaaccgtacaaggttgctgaataagattcgcatccttctggagcaggtggatgaagccattgtgcaggagaactctgtaaaagacacatccgtggagttgactcccgccatgctctctaatatagtggatgaactcaaagaagtgctggaacaacagcctgcaacacaggacaaggaacaaaagaaagctctgcgtgaaaaaaagaaacaggtcagagaacttgaagggtatcgtgacaagctgatggaatacgacaatcaccttgaagtccttggagaacgtaattcctattccaagaccgatcctgatgccacattcatgcgtatgaaagaagacgccatgaagaacgggcagaccaagcccgggtataatttacaaacaggcactgaaaaccagttcatcatagacttccggctgtttcccaaccccaccgatacgctgaccctgatccctttcttccactccttccagcaccgctataaccgcttaccgggtatcggtgtggcagactccggttacggctcggaagaaaattaccggttcatgcaggaaaacgggatagaggcctttgtcaagtacaactacttccataaagagcagcgtccccgttatactcccaacccgttccatgcggaaagtctccattacaatgcgggggaggattattacgtttgtacgatggggcaacacatgaaccgcataggaaccagacgtgacaaaacagcgagcggatacatcaccgaaagtgcccggtacaaagcacaaagatgcgaaggctgtcctttgcgtggaagttgttttaaagcacaggggaaccgtattatagaagtcaaccaccggttaaaccaatataaacggcaggcacgggaaaggttactctcagaagaaggaatcaggcatagaggcaggcggtgtatagaaccggaagctgttttcggacaaatgaaatacaacatggcatacaggaggttccggcatgtgggagaagacaaggtgacaatggactttgccttctttgccatagcttttaatatcaaaaagatgtgtgcaagactgagaaaagcaggaaaggagttcattacacttgctaaatctatatttattgggctatttataactcgatacaacgggaatatagcaacttgttaccaaatgaatgagaaaaaagcggcgtagacaaaaggaaatatagcaggactgtaaatcatcaaaaaaggttgtgccaacgttttgacacaacctctttcgtaacataagatgccaccttttgctgcaaaagatggcatcttttgcataatagcctatagagatgtaattcctttcaatataccatcgtctcatcaaggtagtaagataaaagcgaaagatataataaagcgacagaaataccgttatttagtaaaatctacagaacgtacggtatgaaatcgaaagcactataccttatatatatattcccgatacttttcctgttgtcccttgccgcctgcgacgacatggatgattattcgtccgatccaaagcatacactttggttctcacaggacacgctgcgtatggacaccgtactcaccggtattcccacttccacccgccaactgaaagtttacaatccacataagaaggcattgctgatatcttccattattcttgccgatgccggcaaatccggtttccgtatcaatgtggatggcattaggggagatcaattctccgacatagaaattgcaggagaagatagcctctacatttttgtagaagcgactctgcctcaacaggacaatgccgacattaggttgataaaagactctattctctttcaactgaatggcatccggcaagaagttaagctacgggcatatgcacaagatgcttttactttccgggggaaagtgatcgagaaagatacattgatagcctcccaacggccgatattgatttatgacagtatcagtgtggctccggatgcgcacttaacgctggcagcaggtacccgcctatatttccatggcaaggctggaatgcaggtacacggacgcttatcagtggcaggcagcctatccgccccggtcgttttccggggagatcgcaccgaccgtatgttcccttatcttccttacgaccggttaccgggacaatggggcggcatacgattctacaagaccagttacgagaatcatcttgtttatgcagacattcatggaggaagtttcggtatccgctgtgactcttcgatgacagaccgcaggaaactgacattggagtcttctatcatacggcaggtatcaggcaatggactggagctgacatcgtgccaggcggtggtaggaaatagcgaaatcagtaatgcgggagagaattgcgtcagtttgttagggggagattatacattcactcactgtacgctggctaattatttcagttggaacgtacggaaagggacggcattgcaagtccggaatgaacaggatgacatggcctatccgctttcatcagctatcttccgcaactgtatcattgcaggttcgggtacggatgaaatcaacggaggacgctccaagaatgagaatatagctttcaattattacttctcccactgcctcatcaactcagtgaaagaagaaaatgacaagatagtcaatgtgatttgggagaaagacgataacttcttgctgatggatagccgtacgcaggaatacagctttagcctcaatgaaaagtctaaagccatcaatttaggaaagcaagaagatgctatcgcttatccgacagacagaaacgggaactcccgactacaagatacagcaccggatgcgggatgctatgagaaatcggcttcaaaagatgaataataattgctataccttaaaatggcatctcctcttcttgctgttcttccctttttttaccctctacggacaaacgaagaaagatactctctcttttcgcgttgtcagctataatgttgaaaacttattcgattgccgccacgatacgctaaagaatgattacgagtttctacccgatgcgatgcgccactggaattatacgaaatataagaagaaactgaatgccatagcccgcacgatcacagccgtaggtggttggactccgcctgcactcgtagccctttgcgaagtagaaaacgacagcgtactgcgcgacttgacccggcgttcagttcttaagaaagccggataccgctatgtaatgaccaactcacccgaccagcgcggaatagatgtggcactgctttatcaaagagatcaattcaagttgatttcccatcagggtattcccatacctcacagatccggcaaaaagaaattccgccctacacgggatatactgcacgtctgcggaatgttgctgaacagcgataccttggacatctttgttgtacatcttccatcccgttcaggaggtgcaaaggagagtgagccctatcgtctatttgctgccggacaactgaaagccgcagtagacagtatctattactatcggcatcatccgcaaattcttatcatgggagacttcaatgattatcccgataatgcatccgtcaacaaaatactctcagcagaagcaccaccccagaacggtgacagtctgcaaccgcaaaaactctatcacttacttgcccgcaagagcgcaattcgaaagcacttcggcagttacaaatatcagggtgaatggggattactggatcatatcatcgtgtccggcactcttcttcaaccggatgcggatttctgcaccgccgaggataaggctgatgtatttcattcttcgttcctattgacggaagataaaaagtatggcggtgtacagccattccgcacttactacggaatgaagtatcaaggtggttacagcgatcacctcccagtatgggcggatttccggctcatttattaatccgaatactgatacagtttcaaatcaaacttctgtaccatcaccagcaaatgatcgaatatatcggactgaatacgttcgtattccttccataccttgtttcgggaaaagaagtaaacctgaatgggaactccataagtggtcatttccttctggctgataatcaagtccaaatcctggttcacgacaggaaggctgcaaagataacgttcgatgtaaatacggtagagttgtgcattggtaggtacctcgccttctgccggctgatagtctgccatcaaaggaacttccttacggatggtatccaacatttcgggagtgcaaaacttcagggtcgtcatgtccagatagatattcttatccacacgccggccaccactctcctgcataccgcgccagttctggaaagagccgttcaccaaggtataaggcggaatggtagaaatcgtattatcccagttctgtatctttacggtgttgagggttatctctttcacaataccgttggcggagccattgggtaaggcaatccagtcgccgatacgcaacatctcgttggcagaaagttgtactccagccacaaagcccagaatgctatccttgaatactaacattaataccgccgccgaagcacccagcccggcaaagagggttgcgggagatttatctataagaatagaaatggcaatgatagccgccacaaagaataacaatacctgcaatacctgaacaaagcctttcatcggatggttcttactgttgtccttctgattatgaaaatccagaaaaacgagcagtagcccattcagcgcaaaggctaaagcagccactatatacacggcacaaactttctgcgacaactccaacagttctactccgtgtacaaaagtatgaggcaacaggaagtaaatcagaattcccggtaaggtatgtatcaaatgaggaaccactttccgcttcatcagcaaagtattccagcgatggggtgaacgattggtataatgcttcattccccctaccaatattgcctgaaacagatagtccaaccctacagctacggcaatgattaatatggcgatgatagtttcatcaaatgtattcgcaaatttagggtctactccccaccctataagggttttattcatccaccctcctaatgtcgtcatatatttctccgattttaattgcttatgggaataataacaaataaaggggagctgttgtttaataaaacttttttccggcttcatcttctacttttccggtttcagtaaaaaagtcccggtatatctgtctggaacaaattattttcgcccccggattaaacaaaaaaagtatgaaccgaaatgtaaaacttatcagtattctcagcctcggactaatactgggggcctgtggtggtaattcgtcttcacaagaagaaactatcattgtaaagactgctacagcgagtacctacagcaacgaaacagtcaaagaattccccattatcacccaaccgttccgcaccacagaactgtccttccgcgtcagcggccccatcgaccggctggatgtctatgccggaaactattaccgccgcggagatattattgcagaaatcgatccacgagactaccgcatccggcgtgaacgtgctgaagccgtctatcgccagtcaaaggcagagtatgaacgtatcagtgcgctttatcagaaaaacaacctttctgccagtacttatgagaaagcacgtgcggaatatacttccgccaaagctgctttcgacactgccgtcaatgaactggaagatacccgccttgtagcccccttcaacggatatgtaggggaagtctacgtagagaaattccaggatgtcaaggccagccagcccgtattgacatttatcgatatagaccaactgaaaattgaagcttatgtaacgcaagatatagcctatcgtgttcaaccaaggcagaacgtgctattgacgctggatgtgcagcccgacacggagctggaagcacagattgcagaagtatccaaaggaaccacacaaaacaatctctcttatctggtaacggcattgttgcccaataaagaagcccggttactggcaggtatgtccggaaagatacgtttcgaagaaagtgcttcggaattatcagatagtaccgccaccggcgaacatttggtttgtattccgcaaacagccttgtgcaatcgccccacagtgggaagttatgtatggacggtacatcctgaaagcgggatagtcagccaacgtaaagttagtgtcagcaaactgctgccgcacggcaatgcaggcatcactgccggactgcaacccggtgaaatagtggctacaagcagtctgcgtttcctatcagacggaatgaaagtaaaaatccaatgaaacagcaagtatcatgaaactaatcaaatattttctgcaacgccgctctgtcactattctactgctggtactggtacttgccggcggactattctcgtacgtcaaaatgggaaagctggaggatgctcctttcaccattaaacaagcactggtactgacttcttaccccggcgcatctccttcggaagtacaaagccaggtgacagatgtattggaagaagccatccagtcattgggcgaactttattacctgaaaaccgagaaccgtgccgggctttccaaaatcaccgtatatgtaaagaaagagacacgggcagatgagatgcagcaactttgggataaactacgccgtaaggtaggtgatgcgcagagcaaacttcccgcaggggccggaccttcggttgtgaatgatgacttcggtgatgtgctgggcgtcttctacggactaacaagcgaaggacgcagctaccgggaactggaagatcaggccaaacttatcaaaaatgaattgttaaaggtaaaggaggtcgcacgtatcgaaatctatggaacgcaaacacctacaattgaggtagtggtcagtcccgccgttatgtctcgcagcggcattacgacagcggacatagccaatgcattcaatgcccaaaacaaggtagtggatgcaggtggaatcacagcaggtacaggacgcatccgaatcgaatccaccggtaacttctattccctggatgagatacggcaactcaccatcgtttcacgtagtggggaacacttccgactgggagatattgccgacatcaacgaaagttaccaaacacctgccagcaacttgatgcgcatagacggaaaaccggctgtgggtattgccatttccaccgtacctaccggtaatgtggtagatatggctgaagctatcgaagcacgcatcgaagaactaaaatctgatatgccggaaggtttcggcctcgtctctatctacgatcagggacatgagtctgccatagccaaccaaggctttatcatcaatctgatagtttccgtaattaccgtagtggctatcctgcttttcttcatcggtttcaaaaatggtttgctgataggtagcggacttgtattctccatatttgctactctgattgtgatgttggcaggaggaattgctttgcaacgcatgtcactggcagccattattattgccatgggaatgttggtagataatgccattgtagtatccgactctgcactggtaaatatgcaacggggaatgcggaaacgggtatccatcatgaaagcatgttccggaactgccctccccttgttggctgccacggtcatagcgatactgacattcctgcctatctactattcaccacatatcaccggagaattattatcctctctggttattgtcatcggtgtatcgctcatgttcagctgggtatttgcactgacacaaaccccgttcttcattcaagaattcgtacgccgcccgcccccctcggaattgagtggaaccctcttttccggcaaggcttacgaccgcttccggagcacattacgtttcgtcattcgccatcgttatgccacagtggggttgatggttgtattgcttatcgtttctgcctggagtttcaagtttatcccgaaagtctttgtacccgctctggagaagccctactttacattggatgtatggctacccgaaggaaccgacatcgctgaaaccgaccgcatggcctcagaaatggctgactatatccgcagccaggaagaaacagaaatgatttcaacttatgtaggacgtacaccacccagatattatctgtctaatgtatctttcggccctcaacccaactatgctcagttattggtaaaggcacgttcctccaaagaaaccaaagcgttgcgcaccagactccaagactctatccgtacgcttttcccgggtccactcatcaaagtgaataaattcgagctgagtccgctaacggaagctgttatcgaagcacgcttcctgggtcccgatcctgccgtactcgattcactggcaggtatggctatcgagattatgcgccgcaaccctaaagtagcggatgcccgcaacgaatggggtaacatgacacccattatccgaccggtttatgatccggtaaaagccggtgcgctgggaataacaaagtctgcaatgatggagtcagttaaatccatcaatgacggacttacagtgggagtctatcgtgataatgagaaaaaggtccctgtacaattgaaatccgcaggtaccgatatcacagatgcacagggactgggagacttttctgtatggaacgggcagaattccgccccattatcacaagtcaccgaagatattgaggtgggctgggaatggccacagatgcgtacttataaccgacaactgtccatggccgccatgtgtggggtaaaagccggacacactatggcagaagtgcatggtgaaatccgccaggagatagaatccattcaacttcctgaaggatacaccttcttctgggatgcccaatataaggatcagcgcgaagccatgcaagccatagcaaaattcttcccattggcatttctggcattaatagtcatacttgtagccctgttcggtaacttccgtgacccgttaatcatcctatgtgtattgccgttatctcttatcggtgtcgccgtaggtatgctgatgaccggtttcgaattcggtttctttcctattgccggttggctgggattactgggaatgattatcaaaaatgtaattgtactgctggatgagatacaggtacaacgccgggcggaagtaccggtctatactgccattatcgaatctaccgtgtcgcgtacccgacctgtactgatggctgccaccaccactattctgggtatggttcccctattgttcgatgtggccttcggtggtatggcggctactattatcttcggattgacattcgcaacgctactgactctgttcgtcactccggcactctattcattgttttataaagtaaaagagaaatagattatgaagaaaatatatatcctttttattctatcgttgtgtgatccgttcgcttttggccagcagagtgcgatgctggagaagtacaggtcgatggctcttgaatatagccacgacctgaaagcggcggagaaaaatctggctgccagcattgaactggagaaatccgcccgtgcagacctgaaacccaaactctccggtgatgcaaactttcagtataccggaaatcccttagagattaatctgaacctccccggtatggataacccgctacagatacaaggacgtgataccaaatatggtgcttcccttaccctattacaacctatatatacaggtggacgcttacttgaaagtatccgcatggcacagcatcaacacgctcttgcttcgcaccagaaagaacaacttttatccgaagtctgttttcagacggatattcaatactggaataccgtcgcccgccaggaaattgtgggtatcgtcgcagattaccggaattctatagctgcgctgactcaaacaatccgtgaacgggtggagatctcactcgtcaatccccaggatttgctaatggccgaagtgaaattaaacgatgccgaatttcagttactccaggcacaaaagaacttcgataccggacttatggccttcaattccctcatcggattacctctggaagagcctacacctatagatacgatcattccacaagtggacacttcggacagttcacgactgacacttgcgatcccacgccctgaaatcaagatagcgcatgaccagattaaaatggcggaaagttcattaaagttgaatgactcaaaatacaagcctcaactatacgtaggagtagacggaagttattcttctccgggctatgacctgcgtgccgacctggaccctaactatgctgtatatgccaaagtcagtgtccctctgttcgaatggggaaaacgacgaaatgagaagcgggcttccaaccaaaagatcggtatggcaaaagacaatctgaatcagattcaggataaagtcaacctggaaatacagacggcccgcctctctttgtcacaggcactggatcaggtacaactaagtcagcaatcgctggaaaaagcccatgagaatgaacgtcaggctatggaacgctataatgaaggcgaaatatccattgtagaggtaatagaggcacagacttaccggcaaaatgctgaaataaatcatgtacaagccaaagcttccgcacaaggacagtattcggcattaataaaagcattaaaccaatataaatgataagtgaaaattcgtaactttgcctttatgaagtggaacactcttttatacagcctactcttttcaggattgggaattttctcattcctgttgctggccaattataccaaccttactccgcaggttacgaataccatccacactcccggtgcatttgtttttgttgttgccactttcaatatattgggatattgtactctccgcataagttcgtggatgaaccgtctatactccaacaatttacgttggaagtggaaattcatagcggtatatataggtgttatgctattgtttctgctgttgaactacggtctgttggtggctgccaaactgatgggcagagcggaaaatccatttactttccagatagggggaatacgtattctattagtagtgtggttggtggagcttgtaatcctgggattattgcttgccaaccgctccataaagaatgccctccggctgcaacaaaaagcagcgcaactacagaaagagaataatgcggcccgatatactgcccttcaaaatcagctgaacccccactttctttttaatagtctgaacacgctaatagctgagatagaatataatccgtcaaatgccgtacgcttcacccggaatctctctgatgtatatcgctatgtacttcaatcgcaagataaaaccctgatcacattaggcgaagaattagaattcattcaatcctaccttttcctgcacgaagtcagattaggcaactgcatcgcttgcaacatcacaataccaaccgaagctatggagtatcagcttcctccgctaaccctgcaactattagtggagaatgtcattaaacacaattcaattaacagcaataaaccgatggatatcacgatacaaattgtcgaccactttctggttgtcagtaatccgatacatgccaaaaagagcgataccacttcaggtgtagggctacagaatctatcaaaccgttgcaagctaatgataggtactgacattattatcaataatgaaaatcagatattcaccgtaaaagttcccttaatctatgagtaaactaactgctgccattatagaagacgaagtacccgctgcccgtctcctatcttccatcatcacacgtctgcgtcccgactgggaggttaccgtactacccggaagtgtggaagaagccattgtttggttcaggacacattctcatccggatattctgtttctggatattcagttatcagacggtaattcatttgacttcctatctgccgcacaaccttcttcattgatcattttcacaacggcctatgatcaatatgccattcgtgccttcaccgtgaacagcatagactatatacttaaaccagtagatgagaaacgtttgctggatgctatcgtaaagtatgaaactctgaaaggaaaagactataaacaagaaaattacataggagatttaattcagagcctgcaaaaacaggaaaaaagctaccgcacccgctttcttattgccggagtggataaattctgggctttgcaagtcagtgacattgcctatttctattcagaaaataaaatcacctttgccgtcacaaaaagcggacaggagcatattatagacctgtctctcacccgacttgaagagcaattggatcccagatgttttttccgcgccaatcgccaggtaatagtttgtattgatgccattgtgcatgctgcaccctattttaatggaagaataatacttcacgtaaaaccgattcataaggataagataactgtcagcgaagaaaaagtatcttctttcaagatgtggctgaacttttaacaccatatacagtctttattccaaaaaattatcatatatttgaaaacatgtttataatatagactaactaaagactgaaagatatgacacaaattaaagaatttctaagaagggggctattcacagttatagtactttgcagtgctgcagcatgcagtaataatgatgaaaatgaagataccaattacacattggatggcatacaatgggctatgcttaatgatgataaagttgaagaaacagtcataaatataatgccggaaatttatgaaaatgcgagttcatctacaataagcgttacaatcgacccggcaatggattatgaacaactctctcaattttattatgatgattcaaaattctttcaacctttaaaccaaacacccaatgaggtgaatgttcttacgggtgaattagtttttaatgatttccgttatgtctccgaaggaccagtagtaccctttacccttgaagagtatgcttatcctcccgacaatcatattgaggagactttaacgattcctccgtaccacactttatactataacgccactgttatcaaacgcgaggtgactgcgacatatcgggcttatttcattggaaataactctaatgaacgaattgaaataacaggaaaatggaaaggaactttttacagaaatgataaaagcttaataagacttgaaaaaatggaataaacagtccctattcgggaataatcaacaaatactcctgacaatcattttattatccttcgcgccactttctccagtaatgaaccggataaagtggcgcgaaataatatattacaattctaatatccttcattttgcgacatacttggattcacaaaaatctcgcgcatgggaacaggaaacacctgtctccaaatcggtatattcaaagtactcactgcaatattattacgctttaggaaagcaaaataagtacctgtccctcttaattctgattgccatacattagccaaacgattaatgaactcatcagaagtacgagtggtaaaagctgaagaagacagcgatgcatttgaagaataagccggagatcctatattggctgtcatcacctgattcaaataattctcagcctgcgcagaattccctaaacgagattcacattcagccagattaagcagtacttctgtatagctaaaacaaatatccgatacctgttcaaactgaacattgcgattcgtaccggaagcggataattgatagattaaatctcccaattgatatctgccactgtttacaattccagtcaacatagatttagcctcagcgatttttccctgttccatataaatacgagccaataataaagaagggaagtcacgggaagggaagaaaaaatcattcatcaccgactgtccatttatctctcccggcaagcgttcacgtaagaacagcaatggttctacaaaaagctttaatacttcagcctgtgatattacaggtatacttgttactatttctgatcgatactcaggaaaatatacagcttttccccataaattaactttctcataaaataatataaaacgctgcatatccagcaatttcgttatagttatactatccgaagaagtcaactcttccttgctcgaacgtggtatttgctgattcatgaatagaatcatatttacagcactataaaaggcactccatgcattttccacctctctattatttgagttcaatgtatgatttataaaatcgaaatgccattcataaccttgttccttttctgactgccgggaatagagttcctcttgcgtatacatttgttgcaaaaccagataagaattcttataaagccctgtaaatgtttgttcgccgtattgagtcagacacaaacgtactacctttgtcggatcagtttcttgcttgattatcagtttcgcttctttgttctcatgctctccataaatggtgattgtagcagaacttgcttccgcactaactgccggttctacctttatttccagatactggccatcgtcagataaggttgcctgataaggaatccgaggtttgttttcatacataaacaaaggctccttaaagtaagtatctacagaaacatcataaatagggtcattctccttgccttccggccacaaaagattccacttcgtcatcttcaccggtacattggcatctactttgatacgataggttccacctgccataggtatatccaagcttgtctgttctaacttcacggctgtaggttttcctgcttgccagattttcaaggtatcacattcctggccattcttactctttatcaacacccttcctcgacggggagcaaacccgtcattcttggcagctttcagatagattttgcgaagttgcaatccacgagccgcggtactttctgtaatccactggcaggtatccgccggatgtatttctacatcgacattggcatttacgtctatacccataattgtatcattaggagtcttcagttcgatattcttattatcaatcactactgcatctttctgtgcttgtatcacagtcagtgtgtcagcaatcgcagtattatctttattatagaaaataattttggcgcggcgactctcattcgcatcattgggactgattgtataataaatggtgtgactggacattccccgactcattgtggcctctttaatccaactcacatccggcatagttataccatactcacaattgctacgtaactctaccttaatcgtctctcccttgtcaccaacaggatattcattctcattcaacaatattacatcacctccatactgataaacttttacggtttcggtcaaagtaccatcagtgatatatatttctccttcacgtttctctctttccccattcatctctatcttgaagctgatagtagaggctttcaatcctcgagtagtagtagaagctgcggattttatccaactctgacaatcatctgcaataatagctttatactccacattagcttccacttccacatcaattgttccaccttcctgcttcacttccctacgttcacttgatatcagcaaagcatttttttgcttttgcgcaaccatcaatgttttcttagttttaccggcattaatagtaatagcaacgctacgttcatcataactatcattatcctcaacactgatagaaatttctgcctttccgggacctccactagtgggataaacttgataccacttttcaccattccgagtggttgcagcggttatgttccagttttctgtagccgtaaactccaaagactgagtacccgcagatgttgtgaaattcacacctttctcaaacagggtttctgtttcaggtggcaaggtaattgtagtttcatcttctactttatcatcactacaagcaaccaataacatcaggcacgcaagtagatgccatgtgtttttcataaacgattttactttcatatattattgtttcattaatgatcaagatttcaaggttttattcttcgctcttcctcctgctccggttctcttcaatgcagaggacaaagatataaagacttccatgaaataaggttaaaagggggtagaaaacgtattttgacacccatttattcatctattgcatggctttctcctgtttcatagcctgatagagttgcacgaagcacctgtatcatatcctgtcggaatgattccggtgaaagtatcgccaatttatcccgataccaaagtaattcttgctttagatcatacgtaggtcgcacgaacatttcaaaatccgtataatcttccgtatggttcacttctatttgggatgcgtggagcggaacatcttttagataagcatcttggggccaaaatgcacgaaaacgaatagttattggctcaaactgtcgtataattccaaaacaatgttcaaaataaacttccggcttcaagattgcccgcaatttaggggagaatttcaccttactcccttccaacaattctatttctttcacccgttccagtgcgcaagtcatggcgcgctccttgcctctaacttcgcctatcacataccatcgttgtttgaacaggcgaacaaaagcgggcaacagaatgatttctttctcatcctgataatgtgatttatacactatcctaagcagtcgcttcccgtcgatagcctccatcacatcctgtaaaagattggcagccggtggtgcaggttctatcatcacttcctcccgttgattcacacgttcagcaagactcgatacacgaaaagcacttaaaagccactgctgcaactcgtcatttttaaaaccatccggtcgaataattttatataaattcccgtcacgtttatcacatttgatgtctacgtacatcaatgattccgcttcccgccggtaacggttgaaagtccgctccgccaacggatctccatcctcattagccgatgcattcaaccattttttctgtatctcaggcaaagttagcggctggatactcaaggtatcaatcaaccacaaacaaaatttatatttgaatatcattgttcatcctccttaccgaaaagaaagtcacatatcgaattactcaacattctactgaccttcactattatttttataaatacaattaaataaaccaagagaatcacattggtatgccactgcaattcaaatatgctgggtgcatcaggatcaagcaataccgcaataaaaaatgcacttccaaacatgaaagttgataagccacttgttatcaataagaacacaatagttgttagacagcctctcatagtccttatcttatttaataatgaaataaacaagtttacccagaacccacgaggtaaaaagtaaagctatcaaccccactatggcgcacaaagttactgccagaaagttagtaatatgccatgcctcacgtatttctcctgccacaatgagaagaaacataattacgaacggcgaaggcaacaggcaaagtatgatagacacccactcggctacacctttctttgtcatcactttccctcctttctttttcgttcttcttctctcctatcctcttctgccagttcttctttactttccctgacaccttcccaaaaacttttggaaagcaataaccatccaaggatatagccaatgacagcaagaatccattcgttccatccgaaagcagtggcaaaagccgcaccaacaatagctccgatgcctccgttaatgaggctcttaatcaaacctttaattgtctccataactaaacgattttaatgtttatattccgtttgttttatggaggcaaagttagggggaggttcggccaagggcagtcggcatctcacttatttttcaaaatcttattatctattgtttctagcaaatatctattcatccatttctccttttcagctctcaactcattaaccgtctgtcgcaattcagtaaccaacaagcccaatcgtcgaccctccccttcctttttccaaactctcctttcttccgaagtcattaaatccttcttacgcaactcgctcaccaagcgtttgttttctctctgtaaccaatctattttttccatcagttcttctatattgcgttgctgtcgatgtaaacagactttgtctggaatatagggactcaaattgttatcatccgtcacataatccatcatccatgtcactccacgcatgaatgcatccatttctttctgtgaagggtcgaattcctttatgtaatcttggagaaggtgttctctcgctttagataaatcgttcatttaaatatgttattgattcatttcacttaacatttttgaaacatatccatcatggcgaaaccacttatgagcccagttaggcaccataaatatatatcctgaaccatcctcatgaggagcacaatccaattgatttcctatagcaagtccggcttcctccttggatattccgtagcaacgtcccagctcctcacgcagcaagtcataggtgacagcccgtatcatagcggctgtaactcgatgttcctttaccgcttgagctgttttgggattcttcagcaatatctgtttcatttctgatgtagatggcgttctgactaccggccccactcttaatccccaaaagcagtactcaccttcgactttgaacatacagaaaccttcctgagaattacgagaattacactcttcagcatagtgcttcaattgagaattcgttatgttcctcattaattcaggaatgataggttgatgacgtagctgaccgtaagtatagcgttcgccattaataccaccactgccggaagggatatcagagtcactgacaatgcaagtttcagtatcaagcttttccaatgataaaggataatcaggatacttcatcttaaatctaacttgttcttcaatcattcggttcataacatctaacactaaatcttccaacatccacccaaactaaacaatcaaccaaaatattccccaaagaacaaatgccactaatggtatccaaatgtccaaccaatacatttccatcttagtacgcgcaagaattatcaacaaaacccacaaaatagcaagccctatccaattagaagagaaaaaagcgacatacgattgcataaaatctaccatattaaattatttataaaattaaaaacttcatttttcttttgaataaatcccatatatacttctaccctattctatccaccttcaaatatcccgaattcaatactcccattttcttcaagtcaaccccaaaagctgatttgaagatattattcacttgttccgctgtgggttgatgagttataggtggatacatggaagctatttcaatactcatgcccggttctataaccatacctgccgaacgggcggagattttcactgtaattcgataacgtgccataaattcctattattagactattcaattaaaaatccaaattcaatacttcatcctcattatccagagccttggtaaactcagcaaaactctccaacggattttgagaaactatagaactaatacctttcaaagaaataataatcagttctctgtcatcagaagccagtgcttggtccaatgttttatagtgagccatcaatgccgtactacgttctgcaaaaatctgtgtcagcacatcacggcataactcataacgctgcgttatcttttgaatttgcacagcattctgaagttccaacttcttaatttctttactcaacctattattctccgcccatatatccgtagcccgattcactatttcaggattattccgaacataggtggataacgaacccgcagttcgcaacacagcatcttttgctcccatttttattacacttttgattgattaactttattatattcactgctcaccagaataagatgctgtaagtccttacggaaatcagtagtcttaaacagttcttggtttttctttatgccagttaaatacttccagaacgttggctcaccgaatatctgtttacgcaatggttcatacgcacaaacaaacgctttattgcactgggtcaatgccaccagtacctccgattgacgcaataaggctgcctgataattctgaatagccggtatagctttctttatatattccagagcctcgtttatctgttgctgcacctctctgcgagcctctttggtctgtgaatataaatcaataatattagcaattccgttaatggcgatggacaacccagcctcgacacctgctgctataaaatctcctttagataaattgccttctttttctaaccgattacctaaattctgaagtgtagaatccatatccattcctacagatgataagaaattatccccattaaattgtatatctgacgcacggaagtccacaccggcagtcatattatcaggtacctctatgagtttgaactcgtcaaccaaaagtttttgctgctcggatgatatcttcgtttttataatacctatcaactctttcgacaaatagaggtttcggtatgcagccactcgggatttttgcaaataatcataaagttcatcgttatacatttctgtttcactgatgtccctacccaaatcatcacaacaacttcctaacaagcgcagacgatccatttctttttccaatttagatgaattacctagggtcgcaatacttttaaaaaagcgttttacacctccccacaaactacgatctttatccggatcttcaataatgtaatcttctttgacgtatttattaatatcttccaattcttgagtcaacgacttgatatgggcagacaacctatgatagaatcgatccgcctgaacgctctttccactcagtatcttgtcgttctcatggtgttggcgaaagtagcgggcattgtaaacataagtccagtaaggtataaatattaatccaccgaggacattcataaagaataagtaacgagctatttcaaatgaatagtttagaaaataagagttaggcattgaccagctccaagtgggcatataaaaagagaacagacttggagtatcgtaaaaatacatgattgccgtataattgaatataaacaccaaaagaaccattataaaagagaaccatttccaaacagaagccaacgtattattgtgtttattccataaaaagaaaatatgccctccccacaaaccagaataaagccaaactaaatagactttccacttagacaatggcttggcacgatccaagttctcttccgactctacattggtcgctaccaaagtgatgattacatatgctatgaataccgctccaaaccaatatttcccaaagaagcttttataatcatactgtataacgttttctcgtgcttcctgaaaagtaacatcagatatccgattttccttttgcagattttcgagcatactaattgttttttccgctttctcgcttagtactttatcggccgatgaacaagaacaaagcaacaggagcaatactcctaataaatacatgtttttcatatttacaaacaactattatttaatttattaataacaaaaaagagcgcgaacccacatcacaaatttcttgaaggttcggctctggtaagccttggtcatgaaataagcgaagcagttccacgccctgtacgggtgtgaacaatgctcagacttatattattcatgaccaaaagttcaatttaccagatttaaccttcagaataatacgtcttcgacgttctacaatattctatctttcgtcctctttttcttactttttatatttttgttctttaatacaggcaaaattataaaagttttctgtaaaagaaatactaaagcatataaatattgggagctgcccgcttttttattccatgtatggggacaaatatagggtgagatacagccaataactgacggtatctctaaatttcttctttcagttctttcagtcttacagttctgtcccaatctccctattcatcggctctccggctgaaacttccggtctccttatagtttcagccacattcatgtcataccttctttccagtcttgtgtgccacaacaatggcacttaaactcaacacataaggctgcaagactaccctcccgttcatatacaccctatcatactttttagccaatgaccgactggagtcattcactctaccaactggagttgttcaatcgaccgactccagttgttcactttaccaactagagtggttcatttatcaatcagtatctttggaacaacaggataaggagattcaacgcatcaaaaagcaatatttgcggcaacagtatatactggatacaagccctttataagtatctgattcgtatcctgcccgtgtcaagtccgtatcaagtccgtatctaagaaatcagataaaacattgagccgatacagacccagtacggagcagctacggaccggatacggagactgcatggagattgcatggagaaactacggaaatactgcataaatacaacaaaacaacacacaaaattgaaaaataatctctactatgcaaaaacattgcgcacctccatgcaaatctttgcaacatcaacttaaaagacatcgaaatatgaaagttattgcaatgaacaatgtacccgtaaaactctgggtagaccaactggatgcacatgcctgggaagaagtaaacaacctgacaacactgcctttcctttttcatcaccttgcactgatgcccgatgcacatgggggtaaaggtatgccgataggtggtgtactggcaacaaaaggagtagtaatccccaacgcggtaggagtagatatcggttgcggtatgtgtgccgtgaaaacaaatcttcttgttgaagaaataccgcaggatgtacttcgcaaagagattatgcgaggaatacgtaaacggattcccttgggaagagagcatcataaagccgcgcaagatgaacaatatatgccaaccggtttcgatacagagaaaatgacagtcgtaaatcgccaattagtatcggcacgaaaacaaatcggtacattaggtggtggtaaccacttcatcgaactgcaacgttgcaacgacggttacctgtggattatgctgcacagcggtagccgaaatttaggaaagatggtaggcgattactataaccagatggccgaaacactaaacacccgctggtattccagtgtaaagccggatataaaactcgctttcctcccgctgcgtgcaccggaattcaaacaatactgggcggaaatggaatattgcgttgcttttgcccttgccaaccgtaaacttatgatggaacgcattgaagaaattatagccgaagcattacctaacgccactttcgaaccaatgatcaacattgcacacaactatgctgcatgggaagaacatttcggagagaatgtaattgtacaccgaaagggggctgtacatgccggcatcggagaaataggtattattccgggatcacaaggcacacattcttatatagtagagggattaggtaacccggaaagtttcttgagttcttcacacggggcaggacgcgcgatgagccgttctgaggctgtacgcagtctatcactcgaagaggaaattgcccgtcttgaatcgcagaatatcatacatgccattcgtggacgtcaagacttggaagaggctgccggcgcctataagaatattgatgaagtaatggccaatcaggctgatctggtacgtattctgactaccttatcgcccattgcagtcattaaaggataatatatatcctttcttcatcaacgattctatcttcactgaaggatcattgcgaagcgccttacgcaaataagtaatttgtacattcaacgccagagagtttgcataagaggtactactccaaactgtattcaacagcaagtcacggtctacagccaagttgagattcttcgccaacaagcggaggatctctgcctgacgggaggtaataagtactttattatttcccgttcgtatttcattgatactgtaattgaagacagactgaccaaaacggtaagtctcctcctccaccgtatcggaaagctgggaagtgaaacgttcatggatacgggctataagttcttccggataaaacggcttggcaagataatcgttcgcacgaagctggaaaccttgcagacggtcggccttatcgctacggtcggaaaggaagaagatcaggacgtgtttatccgtctcgcggatacgttcggccacttcaaagccattataaccgggcatattgatatcgagcaataccaaatcaggctttatgagcggaaattgttccagagcaattttcccgtttccggcataagtcacttcatagccttccttctcaagaaagcgcttcaacagcattgaatatttcaaatcatcatcggcaaaaagtattttcaaggctttcatatcattgattattttagagtatggattatgcgggttagcacagacttattggggaataataatttcaatcgttgtccccttgcctgcctgactatttaaagaaatacttccatgatgcgcctctaccaacaactttacatagctcaaccccagaccaatgccgggcaacgaacgatcgggaagattactgccccgatagaacttatcgaatacacgattctgttcggaaaccggaataccgataccatcatcagacacccgtatcatcaattggtgatcctgcaaaagacaatctacaacaatatgcacagacttgcccgaatacttcacggcgttttctatcaaattactgataatattagaaacatgcactgggtctgccgttaccagagtctccgaactgaaatgggtttcaatagcaacatccttatcctcaggcatatggtaaagccggacaagcttttccaaactcgtctttatatcaaaggtacggacggaaagctgcgtgtgttcatcatcggcacgcgtcatatcacgtaatttcgaaagataggccgacaggttatccagctcggacatggaatcgtgaatcacttcatccattgctttctcatctgttcgcatagatttgtcattgagaaaggctatacacattttcagagcctggacgggacgtttcagttcatgtatcatagtatttacaaagctttttcgcagttcgtctatccgtcgttgcttcaaaatggtttttatctgaaacagcagacaaagccccagcagaaaaatcagacaggtactgcccactaactgccaacccatacgcacaagtaccgcatgaggggaaaccttcacggaaacaagcacaaactgacgtttcaggggattataaggatacattacttctatatacggattgaacaacgtaccttgtcgtttcagttccgcattccactggtaaatggaatcttcggaaaccaccagatgcgtggtaaacggttgattgtccaagcgcatggcaagcaaagaatcaaattgctgcaatgcgaaaggtacatccagttcaagacgataaagattaatcaccgaattcagattaggagcatctttatcagacatattaatcttaaatgaatccataacgatgatcctttctttaggaatgatactatccaatgcccattgctcacgctgtgtgtgttttgtttggccatccaccttagccgaatctcgcgtctctatcttgagagtttctacattccctcccatgttctccaactctcttcctttcagagcacccaaaatcacttcatcaatggtggtgcggtgttccaaatcaatggatttgctcagttgatagaagaacatattggcattgttgagcacctttttgggttgaggagtacggatagagtcatactgttgagtggtctgcaagatgcgatcataaatatcattgatctgttcatcattcatatattgatactgattacgcaaccagtaaacctgtccgcaggtaataagcagcatcgatacgatggagaatatccaaacgatcttaatccgttgttccataattgttctttttttagtctcgcttagaaagactttcatttagtaccggcaaaggtaaaagttagcttgcaaatataggtacgtacgaggcagatattatgcattgagtaatatttcagtaataactttcagcctcttctaaagtaaaatccgcatagttttgcactacaatatttgctggcaacagcatgtcaaacctctaaaaagtaaaactatgagtgcaagaattatcttttttaatctgtgtctcgctatattgttcgcatcacaagcgaaggcacaaatcatcgtttccgatggaacgaaaatccaaaatgataccatcggtgaggcacaaatccttgtgcaatacgaaacgcgctgtatcagtaatacagaaaagccggaaaatgttacggaagaaactatgatgttggaagtcggtaaaaatctctctaagttctacagttacaccaagtatgtttgcgactctgtactggcagtagacttcgccaataaagcctcgcaggaaacgattaatgaacatctgaaacaatacggaacaagcaaactgagcgaacgtaccttcagaggttatcctgccggaaaagtaacgactctcgatgaaatagcaggcatatcccgcctgcgttgcgaagaaccggatgaacgtccgcagtggaagatactggcagaaaacgacagtatcctctcctacctctgcggcaaagccgaatgtcggttcaaaggacggacatggacagcatggttcactacagaaattcctgttagcgaaggtccctggaaattatgcggattgccggggctgatactgaaagccgtagacagtgaagggcattattcattcaccgccacaggtatagagcaatgccatactgacaggcctatactcttcgatggaaagaagcatgaaccgatgaatcgtaaagcatacaataaagtacatgaacgctattatgcagatccggtgggatttatcaccggaagtatgccgaacgttaccattaaagtaagtgatgaacgcggcaatgcaaccaagaacccgaaaaacgttccttataatccactggaacggggtgaataagttacgagaccgcatccttgtattcaatcaattgaatataagtgtcccgatcacaattagtttatattatgttagatgataatttatagaacaagttaactttgcatgattatgaacagattacttctccttatggctttcctctcttttctttgtttttcaacaattagtcgtgctcaaactctgagtgggaaaataacagatgcagaaacccatcaaccgctggaagctgtaatgatcagtgtgttacgcggaaacatgatgatagattacacactgaccgatgccaaagggcaatattctctaccctggaaacataatgggatattgcagcttaatgtttccttgttaggctataagagagagatgcgcaatatcagtgcagcaggaactctgaatatcaacctacaggcagaatcgatcatgctaaaagaagtacaaatacgtcccggacgtatcaatacccgaaaagatacggtgagatatgacctggcacaatttacctcatccaaagatgtacacataaaggatgtattaaagaaacttccgggtgtggatgtagatgaaaacggacaggtaaagtataaaggaaaagctatcgaccattattttgtggagggaatggatgtgacaggcggacgttataaccaaatcaacaacaatctgagtgccaaagccgtaaagagtgcggaaatcatggagaactatcagtcagtaaaggccttgaaaggaaaaattaattccgatgaagtggcattgaacctgaaactggacccgaaagcacgtgaccaatggataacaaacggtacactgggaaccggatggagtgacaacaacgacaaactcctgtgggaagccggactgaatgcccttcaactgggtaaaggaaaacagagtgtctataattacaagacaaataacaatggcaaggacctcagcaacgagcaaacaagactgaccggaaacaaccagcaacaagttccactttccggttttctctcccaaccgggcatcagcgcaccattagacaagaatcgcttgctattcaatgaaacccacaccctgaacggcaaccgtatgtacaaatggaatgatgaccgcagcttacgcctgcaagccggatatactcatgatataatacaacagcaacggggaaatacccaaatttattatcaaccgacagataccatacaaatagatgaaacctaccattatcgtctgagaagtgacatcgctaatctggaactgcgttatgaagataacagcaaccggaattatatatccaaccgcttcaccgtagacggagaaataaatcgcggacgttcggaggaactgggacaaactctgcaaacttcacaactaagtgccggaaactactttaaccttatccggaaccgggaaagcagaacctgggaatttcgttcggtgacacagtatgcttaccaacctgcatccttactactcgaagaaggaaaaagtaaattcaaccagcataacttctacacagataacagtgccgcatatctgcgaaagtataatggatttacccaacaatataaggcaggaatacaaggagaacgggctaccctgaaatatactccgacaaaacagcctaatgatttcaatgcttcgcacctgtcattgtatcttaccccctacttccaactggaacgtggaaaatggctgacaacactttcccttcctctgaaagcagaacggtatttctcacaacagcgttcgttcctgttcttcaatccatccacgtatttgcgctataaactggattatcattggacgttttccctttatggcagtctgaaacgttcggcaggagacttctccgacttgtatccgggactctaccaaaccgattaccgcacctggcgagacggcaacggacttttcccaaccaacaccacgcaaacttacaatctctacggagagtacaaaaacactgtacaggaatttttcatcaccgccgcactaacctacagccgcagcaatcggaatacccttttcgaacagagtgtttccgaagatgccattgtctacactcgtcgtgaactaccgaaccatagcgacagctggaatctcagcagtactttgtccaaaggtatatacgactggcatttgaaaacctcactcaccctactactcagtcgcagcaatggtgaacagcttacacgcctggctgacagcaaaggtaatcagcaaagtcttctgcaaacctatcgttatgattatctgaagacagagcctaaaataatctggtcgcccgcagatgtttttgaagcggaatatcatgccacattaggctatggtggcagcaagataggaagtgacacccgtctcaccccgttactggacttcgtacaacgattacatctcacattcagtattgggcaagtggacctgcggctctccggcgaacattaccggaatgacctaggaggaaacacacatctcaacacagtgttcgcagatgcatcccttatctataaaagaaaaaaatggagattggaagcaacccttaacaatctcttcaacaaaaaagagtatgcttacacaacgtattccgccacgcaaagttacacttcacggctaaatatacgtccgagggaagcaatggtgacagtcaattatcagttctgaatctataagatcatcaccgtggaatatatcagtatccccactatcgtcaatccgcccaccaatataggagcataaatatggggaactttcttcatggtcttatacccgctgactttcaagaaaaggcggtatacgatatatgcggccaataatccgatcagtgttcccactatgagatctcccggataatgtactcccaggtagatacgcgaatagcaggtcagcaacgcccagcccatcataaatacggtgagccatcgcttacggaaaagaaaccagacaaagaatgccaggccgaaagtattggcagcatggcaagacgggaaaccataacgccctcctcgacgtccgtttacaatatgtaccatatcggatataggattttccagattggaagggcggagacgttccacatacggacgtatcaatgtcgcccccgtctgatcggcaatggtaattacgagtgccaggccgaccatgcagaacaaagtcactttccaatggaaattacgtagcatcacgtaccaaatggcagcatacatgggtatccaaatccatttaccactgtaggtactcatgaaataatcaaagaacggactgtgcatccggttgagggagaggaatatgtcagtatcaatgtcaacaacctcattcaaaagttctaatagcatcatcttgttttatcttttagcaatgtcatcatacaatttctgcaaataggccttgcccggcagcaagttctttcctttcgtactgccttcatctactgccacggcattagcttcgcaattaaatatcaactgattgtccggtgtcaccatcccaaaagcatccggcacggcaaagaatgcaaaatgtggagaagccggattcagcatatctttactgaacacaaaatcctgatgcggcaatgataattgtgccaataaagtagctgcaatatcatgttgggaaccatatatatcaatgcgtcttggttcgctaaccgcacctcctatcaataacaggggaatttggtaacgatctaccgatagattattcagatgttcaggatatgcacccagatggtcgggaaccaataccaacactgtattcttccattgcggcaattcgcggaaacgcttcacaaagtcgcctacacaactatcggtgtaagcaaaagcgtttaaacgatcattcgccagacggcgatacggaacttcaaagggttcatgactgctggaggtttgcaatacctggaaaaaaggacgggcattttctgccgaagctgtgtctgccgcctcagctttcatatcttccagcagacggttgaaaacaagatggtcatgcgctccccatttactcaagcgctctgatacgggaaagtcctgatcggaaataatattctcgaaaccggaagacatcagataggaacgcatattcgtaaagtcggcatcacctccataataatatttagtacggtatccggcatcacgcagactacctgcaatggcaggaagattctgtgtcttacggggatacttcatgatactcgtggtaggctgtgcgggatagccactcagaatagccaccagtccacggtctgtgcggaaactgttggcataaaagtttgtaaagagtattccctcctttgccagactatccatctgtacggcaacatccggctcaccgcccaaagttgtcatcaatctggatgagaagctctccaatataacaaagataacattagggcgttctgtcttgaataaagtcgtacgtaaagtatcgggaaccattgcagtactgtccagcactgacggatctaccagattctttatcagctcatccgcctgtgccgcttccataaaacgatattgcttgccgaaatctttttgcttggatagagattccatcaagctgaatgccggattgatagctgcatggttcaagcgttggttggaactgaaataaactttgccggtgttcattgtagaaacagtaaaaccaccacgaataggaataaaaagcaaaccagtcagtaacagcattacacctgacaccgacaatcggcgataaggcagtttcatccttttccagatgcctttctgtatccaaagaaaaagaacgtaaagcaatgatgcatacaggatcatagctactatccctcccagcacctgccatatactgatacttgccagcgcatctttgggagaagagaagaaataaaagagcggtgtagcatccagacggaagccccaatactcatataaacctatatcaacaatgaaaatgacagcgagcaaaatagcgatgaagaagtaatagccgttccagatacggcggagtgccttggaaagtgtccaggcggacgctatgaagaatagtccgggaatagccgttaaatatccggcaagcgagaggtcgagcggtagaccattccagataatcttgaaagggtctgtccaggaagttcctgcatacaaagaactgtagtagagtataaataacggtttctgcagtataaagatacagacgaagagaatgtacgtctttatcaatccaataagcctttctttcatcagctttttctctttttatatttatattgagcgcaaaaatagttgttttattctattttacgccaatattgttcaagaaaaccgtgaaagataggcttatagagtattttttattatccgtttacacgtttatagtcttcaaggaactttttcaacccggaatccgtcaacggatgattaagtagacctttgatggcagacaatggacaggttgctacatcagcccctacttcaatacattgcatgatgtgcgctgtatgacgaatggaagctgcaagtacctgtgtagtataaccgtaatatcgatacatttctacaatcttgcctaccagtgcaataccgtcttcacagatgtcatccagacgccctacaaacggagaaacataagtagctcctgccttggcagccagcaatgcttgtcctacggaaaatactaatgtgcaattggtacgaatccctttggaagtgaaatatttgacagccttgataccgtcggcaatacagggaacttttactacgatatgcggattgagtgcggcaagttcttcaccttccttaatcataccttcataatccgtagcaattacttcggcactgacatcgccttgcacgatgttgcagatttctacataatgtttccgctggttatctactcctttgataccctctttcgccatgagcgaaggattagttgtcactccatcaagaacgcccatatcataggcttcccggatttgatctaaatttgcagtgtcaataaaaaacttcatggtataaactgtttattatgattaaaaatagaatgttacataaaatgaaacctcaagaaatgaggcatatataattagaaacagatagttaagttaaatgttttcagtttataccgttttatcttgataaagaggaaaagagcccaatggagaaaccattattagacacacacatgaaaactattcccattgggctttcctcatcccatatagaagcaataagtaaatacagtttgcctgaaatcacttcggtatgtattttacttctatacagcttttcccgtttcacaacggaaagcatatattataattatggattcaatattcagagggcatgttgttcaactgcgcttttgtaaacacaggcccgtctttacagacatacaacttcccgacattacatctaccacactttccaacaccgcatttcatccggttctctaaagttgtgtaaatgtcttcgtccttaaaacctaacttttccaatacaggaaaagtaaacttaatcattaccggagggccacaaacaatggcaacagtgttatcactgtcgggagcaacagcctccagcacagaaggaacaaagcccacctgccctttccaatccggtgtttctccacccggatcaaccgtagtaaccaaacggacatccggacgattatcccactccctcaattcttctttataaaccagatcagccacagacttcgctccatagataatcgtgacatcattgaaattttcacgcaaatccaaggcattccagattacgcatcgcataggtggaagtgctattccgccagctatgaacaaaagattctttcctttccattcatccaaaggaaacgtattgccgaatggtccgcgaaaaccgattgtggcgcccgtttccaatctggataagcctgttgtcactcttccggcttgtcggaaagtacattctatatatcctttgcgcgtaggagaagaggctatacaaaaagtagactccccctcaccgaatgcagaatattcaccaaactgtccggccttgaaatgaaaatcctcaccttcccgttcttccttgaatttcaggcggaatgtccggactccgggagcttcatctgttattttttcaattatcatccgatatggaagataaagggaatctttctgtttatccatgattttctattgacattaaatgttcaacgatattcatatcgaccggacaggcacgggaacaacgtccgcatccggtgcatcccgtttcattaatacgatccggcatgtatgaaaacttatgtagaatacgctgtctccagcgggtactttgagtaggccggggattatgtccggacgtatgttgagtaaataaagaaaagccacaggaatcccagcaacgaatccgactaccggaacttccccgagcatcttcctgaatatcaaaacaagcacaagtgggacaaacaaatgcgcaagcgccacaccccaaacaacgctcggattgttgtttccaaatagggctatcaaaagctccttccagtttttcacggagcagttctaacttgaaacgaaccggaacagaagccaaatatgtctctttatctattccgtccgctggtgtagtttcctgtacaaaacgttctatcaacaatttacctttcggagtcaatatctccaccaaagcactccgatccggtaattctgttacttgtatatcgctgccttccgtgtttcccggaccaccatggacagaagtacaaaaacaatattcatcacatcgggtacaactgaaactaactaaagttattttatccctccgcgcattatatatatcgtctttataatcccagttaaaaataccggtaagtggagcaaaaccagccgcatcacaaggacgcaccttccaaagcacaatttccggaaaatcattcagatccctttcctgtaaggttacgtctttcccttcttttctgtatgagaataacttttctgcctttggaaaggcaaaacgcttcgcggattgggtagtctgtacataatcatcagcaactttatcaccgaaagccaataaccggaaatctgttttttctccatcatgtacaggggcaaacacttctatcttactgtttaccatctgataaagccattgctccaaagcatgctggctgatatgtaaattagtcattgtttccattaatgtatgaagtcttctttatcttccactctaaaagtggcaagtacatttcccttattccccagattacccggttgtttttcaaactcatgccggatagtttccatcatattctgtgtcagcaaatgaagaggaatacctacaggacaagcttttgcacacgctccacattctacacaacgcccagccatatgcatgacccggtttacctgccactccatattagtcagcggagccgaccatgcctgtatccactgaggacagttcacttcaacaatgcatcgattgcaataacacaatgggcaagctgcacgacaggcataacacttaatgcattttgacatttcatgaatccaatattgccacctgtcttcacgagtcatgttttgtatcttctctatcagttggcggtcttcttcactcgccagcatcggatagtcagccatataagcataaatatcttcaaagttgtcgaactgaataacttcttcctgagcattcaatgtgagaataatccattgctcctgcttcaattgattttctgacgctagttgcagaatagtacgcagtgcagggagattagcaaacaaggctgttttatctgtaccgaataattctgttttagtcaaataaactgcaatattattcgtacaaaagtcatcccaaaccagtttatctgcctcctctatatttctacaaaaaaatggacgtactccgtgactccccttctcaaagccaataaccaatttcacgagatcctcggtgaaaagtgactttactttttcggccaatttattcataagccacctcctgttctaaatatgcagctaccttcttgtattcttcgtaaggtcctaactctcgaatagcggcaactgtctgattgactaactctgcccatttggctccttcggctgccgatacccaagaataacagattctccgaacatcaatgcccaggaaatcaagtagtccgcgaaagacaatccaacgccggcgggcatgaaagtttccggatgtatagtggcaatcattcggatggcaaccagatactataataccatcggctccaccagcaaaggctttcagtaataacataaaatcaatcctacccgtacatggaaaacgtacaatttccacattggtggcatatttcaaacgacttgttccggttagatcggccccggcataggtacaccagttacagacaaaagcaacaatcttcggttcaaattcagatttattctcattcatatctaacttccttttaattgttcaacagagccattacttcagcatatacctgctcattggaatatccctgtatgtcaattgatttagagcggcaaaaagcaacacatgttccgcaaccctggcaaagccccggattaactttagctactgttttcaaaactttgcctgtccgatcttttatctcttcacgttcaatagcctgataaggacaagcggtctggcacataaaacaccctacacaagtactgaacaagggaggtgcagtccgattgacaacagcaatcataggttcacgcaccaagttggcttgtgaaaataagcttgctactttcacagctgcaccggatgccatccccactgtctcgggaatatcttttggagcctgacaggccccagccagaaagataccggcagtgttcgtttctaccggcttcaacttaggatgcgcttctgcaaaaaactgatatggatcataggagatatgcatcttctgagccaagtcttctgcacctttatttgctactcctgctgtagccagtaccaccatatccgcttctatctcaacaggagaagcaccgagcaaagtatctactccctttacaatcaacttgccatttttttcataaatccgtgcaacacgtccccgtatatagttcaccccatcttcttcaatcgctctacgcacaaattcttcataattcttaccacctgcacgaatatccatataaaagacataagattcaccattgtgtactttatgctgataaagcatagcatgtttggcagtatacatacagcatattttggaacagtaaggaataccttttgccggatcgcgtgaaccggcacatgcaacaaacacaattttttgagggattttaccatctgaaggacgacggatttctcccaaagtaggtccggatgcagaagccaaccgttcaaactgaatcccggtaataatatctttatattttccatagccatattccgggaaaaagtctgtattcagtacattaaatccggtagtaaccacaatagctccaatattttctgatataatacggtcctcttggtcaaaacgaatagctccggtcggacataccttttcacaaacaccgcatcttcctgtccgaaaatgagtgcaatgtactctgtcgattaccggcttattaggaacagcctgaggaaacggaacataaattgcagtccgcattcccaaacctgcattaaattcgctcggaatcttctttgtgggacatttcgttgtgcaaagtccacaaccggtacataacttttcgtcaatactctttgcctttaagcgaatacttgctttgaaattacctataaatccttccagactttccaattctgcataggtataaagcgtaatattaggatgctgagccacctcaaccatacgtggagtcaagatacattgagagcagtctaaagtcgggaatgtttctgacaactgtgacatatgcccgcctatagaaggatctttctctatcaaaatcacctgatatccacaattggcaatatccagacttgcttggataccagctattccgccacctatcaccaaagcttttttagtaataggaacctgtatcggattcagtggacgattccgctttaccttctcaaccaaacttctcacaatgtcaacagccttacgtgtagttgcttctcctttatcatgcacccaagaacaatgttcacgaatattggcaatttcacacaaataaggatttaggcctgcttcggcacatgcccgacgaaaagtcggttcatgcatacggggagaacatgcacctaccaccacaccatccaaatcatattctttaattgcattctttatgagtgtctgccccggatccgaacacatatatttataatcaacagcgtatgccacgccttccatattcgcagccagctcagcaacttttatacaatcaacagtagcaccgatattttctccgcaatggcatataaagacacctattcttgacataactcagcctcctttaagtttacacccacaaaatgacgcttcaaccctaagtctttagctgaaagtccgatagccaatcctaacacttgagttacatatagcacaggtattgttatcggttccatcaaatgcctgttgatagtagaacgacgcatatccaaattggaatgacacatcggacaagccacaatgacagcttccgctcctctgtcgctggcatctttcaagatatttccagaaagacgcccaaccaaatctgtgcgcgatacggacaagcccgccccgcaacattcagtcttaaatgcccagtctataggattagcccccaatattgacataatcttatccatactttgcggatcctccaaacgatcaaactttaaaactttatgcggacgaagtaataaacagccataataacaagccacctgatgagcaaatggccgtacaatcttatccggcaatatatccaatatatatttttctataaattgaaggacattcaagacttttactgttcccagataaggcaaacctaccaccgtcagcacatcatccttcaacttttcattattttccaattcatattgcgccacactcagacgattatagcaggaagcacaaggaaccactatttcctgaaagccttgtttctcggccaatgccaatatacgagtaggcagtgctaaagacaattctttattcatggaatgtgccgcagtagcaccgcaacaattccaatctttcaactctacccaatcaatccccaaagcctttcctattgccttaaccgactcattgtattcacgggaagtaccattcagcgaacatcccggatagaaacctattctcatacttttctacttttcttttttgtcaatagttttggaaaatatcttctttatcttttgcctggtctcaatacattccggcaaaaggttcaattttcctttcttcaacataccgggaaccaagtttacatcctgtagcatgtgaaaggtacgcatcttaaatccggcaactaaacctatctcatacaaccttccggtatatctcactgattgtaggaaagcactgtggaaagcaaccacaggccgggattgtttatttatacagttccggtggcgggactgctcccgtagataatccatgattttaggaatatcaatttctttaggacaccgtgcaatacaattcccacaattcaaacaaatccagatagcattggaaccaagcacacgattgtcattttcaggggttcttgtctgaagcaaacgtaccaagaaactgggaggaaaatccatttcttccgctaagacacaccctgccgtacatttaccgcactgatagcagcgcgatatgatgacacccgcctcatgctccaagccataggaaatacattttttgttttccatgtcagcatgaaattaaataagaaataataaagataaatgaagcaatagatagagcctgcagaaaagaagctgttgctcctcaccctatcaacaagttagaaaagaaatgtgaattaaataagaatatggcctaatgtatagacatagtatccgttagaatatttaatataattggtatccggagaaagtcctctccatttattttccggaagttgagtatctgaaagacaaagcatctgcacgattgtagcagaacaaaatctcaaaactttagaaggtgttgtggtatttctgaaagaaaacaaaccacctaacaccccgtcactaattgtataatcggatgcttcgctatcgaaagcgtgacttcctccatatgattgtccggcaacagtcacagaaatcttctgtgccaatctggtatcggattgcacatccatggcaacaaccccggcattgggctgagcctcttgcactttttcatcaggagtatagtgaaatcctaacattaaaagtgaaccaaacaatatgcaaaagatatacttcatcataacgggtgcaaacgtagtaattatctttaatatgaatacatttttatcaagaaattaatatttatttcacactttccaataataacaaaatcattcaaaaaaagcattagaataccagatgaactgatttgcagcctcttatcatttcaaattgatgtgaattccaattcataacctcattattaactaattgctacttgtatttgatttaggaaagaagggtaataacccaataaactccggctgccaagagcccactcaccggaatagtcagtacccaagcagtcatcagacttcttgttactccccaacgtacagcggagagtcttttagtagcaccgactccaataatagctccggtaattgtatgtgtagtactcaccggaattttcaagaactccgtaagatataaagtaaaagcaccggccgtttccgcaacaacaccttccaaaggggttactttggtaatcctggtacccatcgttttcacaatcttccacccaccggacattgtaccaagagaaatggctgtaaaacacgaaaatgccacccaatccggtaaatcctcaatactgtttattcccattcccaagccttccgaatgggctgctatcatggccgccgctataatacccattaccttttgcgagtcattcaaaccatgccctatactgaacatagccgaagaaacaagttgcaatttcttaaaccagacttcagctgtatggggatgtgcacgccggcaagcataaagaaccaacaatgtgaatccgaaggcaacaatcattcctatcaaaggagcaagaaatatgaaagccgcaatcttcagaatgatattgagttgaatagcatcgaaaccatgagccataatggcggctcctgcaaatccgccaataagggtatgggaagaagatgagggaatacctctccaccaggtaaacagattccatgctatggcagcaattactccggataatataatcggcagtgtaataaactgttccatcacagtcttggacacagtattggctataccgaaaccaccgattaaatatttggcaataaaaaatgcaacgaagttaaagaaagccgcccatattactgcctgaaagggagtaagaactttggtcgatacaatagtggctattgaattcgccgcatcgtggaagccattgatataatcgaatatcagagccagtacaataattattactaacaattccatgttctcaacttcttctatgcgtattttataatcaaattctttagtatcttgcctacctgctctgccacatcggtcgttttttccaattcatgcatgatctctttaatcttgataagttcaatgcagtccttttcttcttcaaaaagcttcgtgataaagtgttcatatacatcatctgcctgattttctatatcatgcaacttattacagtatccacgcaatgcggccggtttctgacggaaagtttcaagttcatccatcgccttgccaatatatacagcttcctgttgaatcaggcgactcaattcttttccgctatcggaaatcggacgaggattatagatattaatacgtttggcacaactgtttatcccgtctataacgtcatccatggttgaagccaacgcatgaatatcttcacggtcaaaaggagtaataaaagtagttccaagctcatcaaggattaaatgagttaatttatccccctcacgttccaggtcttttattcttttataataatctgctctctcctccggtttatcatgttgtaaactttctaccaaaagagtggatgatgcagacaaaatctcagacaattgtttcaacagaggaaagaacttaggttctttgggagtaaacctgctaaaaaaagaattcttcataagaataaaaatatcaaattatttctgtttttttgatttcatttttgcccgtatcacctctataatggcaggtaatatggatataactataattgccacaatcaacaatttaagattttcctgcacaatcgggaggtctccgaagaaatatccggcatagcagaaaagtgccacccaagctgcacctcctatcagattgtataccatgaaataatagtaatgcattttacccattcctgctacaaacggagcaaaagtgcgcacaatagggacaaacctggctataattatggtcttgcctccatactttttataaaattcatgtgttttatccaaatgactttgtttgaatattctggaattgggattattgaacaatttgcgcccgaagagatgccctatcatataattacaagaatctcccaaaactgcggcgaaaaacaagatcaaaacaagaatatttacctcaagaggcgtcccgggtaacgaggctatagctcccgccacaaagagtaatgaatctcccggaagaaaaggagtaacaaccaatcccgtttcacaaaaaatgattatgaacaatattatataagtccaagcatgatattcctgcacaatgttaatcatatattgatcaatgtgaagaataaaatctaatataaattccattatctattgagtattaacatataggtatatacatattccacaacagagatacgacttttcagttattctcaatgaaagaaatacatatgaattgaagtaataaggagatataagacacacttaatgccttatagaaaagagaaagattaaataataatatgtcttaacgcatagatatagtatctactggaatagtgagtaagagagagttgatacggaaaagacattcttttttcttcgggaagtagcacctttatggatttgacgatctttgctacaactgaaagggcattaaatcttagaacttgtgaagaaggaatattactgcgcgaaacggatgttgctatattaccaatagccttactcgcatattctccgccatagaccactttcctacattgctctgcacctgcctcagatatattacattccgtcttaccctgctgcaagcctgttacacgaagttccttatactccttcatatcgccggatacagattcgaatcccgatacaagaaatacacctaataatatgcaaaataaaagtatatacttcgccataacggctgcaaatataaaaagtatttttaagagatgaatcattttagccttttatcttgcaaacctcttttattcttttccgggtaatatatacaaaaagagcggatcgtcatacatataacatacctgatacaatcgcttcccatctgatacaaccctgccccaatggtcaagtttataacgtgctaccggattgccaccccaatcatattgctccacaaagatatatccgtcacttttaccgttttcacgtgatacctgaagtggagtacgtccgctataagtcaggatgttttttactaaatgcaagattatatatctgctctgtatgcaaactgtccccttgataaacagcacgaataatggcttttcctcctgatacattatcagcataatagaaagtatcccgggaaactacacatatctgccggtcagaataagaagaacctttttctgacttaaaagtaaagggtaaaggtttcaagacacctgtcgtatcggtttcaaacagttgcatagtgctggtttcatatacatacgtatcgggagtagatacactggaaggtaccagatggggtttctgcaataatcgtgtcgttcgcctcccgatgtttctgctctgcccgcggcttgcaggcagagagaaacgatagagacagcaatataatgtaaagtaagtgtttcatttattatttcaacttagcgtacagaatatagttattgtcattctcatgaatgctatctgccagcttttgtatacgttcccggtcggcagcagaaatgtctttaacgtctaccagatatttttccaatgtttctttcagagttacaggctccatgttggccgtataatatccgtttgagcaactgtacgaaaaccaggaaataggcaaattgcccagatagtcattctccactttatagaaagcgccttttaaagtctgtttatctataataaaatcagcaggagcctccgtcgtgaaattgttttcatccaattgtttttctatggatatacttcccaagaaatgatgtggaaattctttgtaatcatgaatagggatttctttttttgcaaaattcatagtgaaacgaggattcaaacgtccgttggcataatgataaaggctatccggacggcgttcccagaatggagaaagagatacatcaaaatcagcaccattcttattactatgtacctcattgctgaaatcaggttttaaggccaaatggcgtgaacgtatcgtatcttgtatttctccactgaacttctgagtccatgccacatacggcaaataatcaaaaggcagaaggaatacagacaaaagagaatcctttgtatttgccttgaagacacctttcggcaccaaaccgggtagtgaaatgttctgtacagactgtcctttcaaatcataggccagcagagatcttgcattccacggaagtaaatatatacgcccaccagcctcgtctatctgagcatcatagatcaactgatactcaccgggaccttgtccaaaagcccccacattgccaagaaactttccagatttatcgaaaagcttaaaaggagtttggtctttgccccataccaatatataattgtcagaaacaatcacattccgcacaggcaccaatgcttcatcccggttatccaacttcacaatctgcaattcatctgcaaaataactcaatggaagtactaatgtatctttcagtgccgattggttgcaaacccatacagaatctccatttaaaatctccaccgaaccaactatcggttgtgcgtctaatgcatcaccttttgatccttgtccaccatttgtacaagaactcaaccctccaataaacaccaggcatatcagtcctgcacttttccattgtttgcttttcatatttttattttttacatgaaacaatgaggcaaagatagctggacaaggaaggaaatacaaattatcttatagacaaaagctcaaaaacggcgcaaaaaatcatccaaagtctcattattctccgtcaatcccaacttatctcgtttcatccgctgtttcttacgacttatcgaggtgcgactgatacagtaaatgtcagatagatctttaatactaacgtttattttcaccaggcaacaaaaatacacatccttcatgctcaatcccggaaaagcttccagtaatcgcactgaaaatttatcataacttccatccaccgtttggcgtatatcctcccattcttcattagacaaggctatacgtcgattttgattatcattttcctcttcagcactctcctcttctttttccaaagagggaattttatgaaacgacttcatccgtcgaaaaagcgattcacgaagctgactctctttttcgcgcaatatactcaactcttccgactgctgtaacaattgttccgtctgactcagtctcagggattgctcacgccaaagctgcttatacatctggcgtttgcgacgttgccaaacaatataactcgcagcaaatgccacaacaaaacaaagtcccaaacttaacagccagattccccgcctctgcttatctattttcaaccggttcagttcattttccagtttagccttttcatacttcgtccggctttcaactccttcctctcttctcagttcatttacaagatgttcattagcagcaagtgctgaatagaaagagcagctgtctttccccagcgaagagtatagtaacttcaacctccgggatgcctcggctgcaacccaacggttcaaggacatcgacgcaatacgataataggtagaagcagaagcatattcgttgataccggcccaaagatttcctttagctaaatgataataaggtaccatctgcctgttatccatattcttccgtatagaatctaatccagataccccttcccggaagcgcccggcagcagtataggcatcagctattccctgacagataaaactatactgccattcttctgccgtacgactggccctcagaaaataacggatagcctcatccgattctcctcttgccgaatagacagaagcaatgtaacggttcacctgcgctttatgcccatcacgtatgaagaaaccttcagccaattgcatatagaataacatgctgtccatgttattggaatgatgataaactgctcttcctttattatacaaattcaaaccgattgcgaaagagtcgggtattatccgggaactttcacttatcggtgccttccctctcccacaagaaaagaagaaaaaaagtatcaaaaacaggaataacagtttcttcataattttgactgattaccgattacgctttaaagctatgcgatctgtaatagtagcgggcaactccctttcataatgggtaaccataatcatggttttatcctgccggcggcaaaatgcttcgattatcttctttacccgccgacgattgtatgtatccagaccatgcaaaggctcatccagtatcaataattccggatcttttacaaaagcacgtgccagaagtgccagacgttgctcaccgctggataattgcaagaaaggtttgtcttttaaggcagcaataccgaaaatatccatccaccattcacaaacagacatctgttccgctttcgggcgcttgtatagtccgatactgtcgtgcaggccggaggcaactatttcaatcgccggtagattcttcaaataagcacggtgcatttcagggctgacataaccaatatgtttctttatttcccaaatgctctcccccgtccctctctttctcccgaacagactgatatcgcaagcgtatgattgaggattatcggcacacacaagactaagtagagtagactttcccgctccattctcaccactcaacgcccacttctgtccgcgcatcactgtccagtccagttctttcaaaatagtacggtcaccatagcgaatactgactttattcaatcggaccacttcatcggatacataattggtattatcatagggaaggtcaataatacgctgctgtaaatcttcgggtacaagtatatctgcattccggaatatggtaagatattgatcacgttgcatcatttgccctaccgtacgattagctatcggcaacactttattaatatatgagggaatatcatccatcatagaaagtatcaggataagttgtacggcagagcgtttggctagtcctgccaacaaagtattcagcaattcacgggtctgggcatccagtccaatgaaaggattatccataataagaacacggggagctgtaagtagtgccttcactaactgaaatttacgcaactcaccactggaaagaagaatcatcggcttatccagcataagttcaatacggaataattcaaaaagttcttgtttcagtttctcatccctgacttctcccaacatatccctgactaacggaacatcatcatgatcatgggtgttccaacgctgctgataatagtaattggcatccgccgacccatacgtatcgcgaaaagcaatatatttgatattctcatagactgtttttgacgttgaaggagaaaagtcataggttattgttccttccttcaaagggtattttccgataagcatatctaccaaaaggctttttccagaaccgttaggtccgacaatggcaatgtgttcatctgccggaaaagatgcggaagcaggtgcagctaatcgcacaagtggattacgagccacaccacccgtcaaacatatagtatatggttgcattatttcagacgtattttgtttagtgatgccacaaagataccaagttttccttttaaatgctcaaaatgagagcagtttaatcaattctcccttttttaagcaactaatatgaaaaataatccatatattgggaaacaatttccctaggaaatctgtttctttaaaagacatgtatcaaaagtattaaaaaggatggaaaaaacattcgctaaaagatattggcctacaatcgtaggtgcaatagtaggggctattggcggctatctatattggaggtatgtcggctgtagcacggatacttgtccaattacctcatctccactaaacagcacattgtggggaactgccatgggtggcctattagggaacattttgcagccaaatatcataaaaaagaacaatcaagataaataatacaggatctatggagaaagaatcaacaccagaacgcccgtcaggccagacctatgacctttccggtatgttttcgctggctctccgcctggtagtcggatggacttatttttctgcattctggcgaagattagttcttttccggtgagcaatatacgtaataaatatgttgcaaaagtaaaacccggggaacatagtctcgttattccattaggggctaaagcagaaattaatattgaaaaaaacactagcgatataccaactggaatatataaacttgaattaatggatataagcggaattacctggaaaacggatatcgctaaagaataacacaaactataatataatgcccaaactctcaatttttatgtatccgggcgaatacagatgcgcccctacaagtaacacaactcgtaggggcgatattttattatatatacgctattcttatttataaataatcaacgcagactgtgcaggaacgatcacttctgatccgtaaagtgtacccaatcctttttcactgatgaaaccatccttgcaaacaaccgtatacttaccttcgggaactgtcagtttagcaggttctttacgtgagttcaacgccactataatatcttcccatgcatcactgttggcatgttccttcaaacggtaggctatcaagttactgccctccacaggaaggaattccaaatgcttacgtaccagatccgcatctcccatgcggaaagcagggtgattcttgcgtaactgtatcaaacctttataataagcgaaaacatctgcatgttctgctttacgtttccagtcaatagcatttatagagtcaggactttggtaactgttatgcacgcccttcttatcacgcatcacctcttcaccggcataaataaacggtatgccttgtgaagtaaatacagccgtttgagccaatttatccaattttatcaactcctgtggcgtaatacccggaacacttgcattcagtctgtcaaccaagcacatatcatcatggcaagaaacataactgaccatttgtgtcggctgttcagcccaggaagccttactataattcaccaaatcattgtccacttgcggatgcttgatagcaccaacaataccaaacttgatactctcctctcctcccggaactccggcaagaaaagcaccttgatgattgtcattgaacgggccacgcaatccatcgcgcatttcatcagagaatgcagcgatacccggcatccggtaagtatttgctttcatagccaacgagtcttcaggcatctggggagctttagccgcccaaccttcaccataaataatgatactcgggtcaactgccgtagctgccttacgaatttcattcatcgttgctatatcatgaatgcccatcagatcaaagcgaaaaccgtcaaggtgatattcattaatccaatgcaacacggattctatcatatatttccgcatcataggacggttacttgccgtttcattgccacaagcggaagcgtcagcaaagctaccatccggcatctggcgataaaaatatcccggcactgtacgttcaaagttgctttcagccgtattgaatgtatgattatacaccacatccaacactacacgaattcctgctttatgcaatgcttgcaccatctgtttgaactctttaatacgaacagaaggatcataaggatcggtagaatatgaaccatcaggcacattgtagttctgaggatcatatccccaattgtatttgttttcatccaatctggtctcgtctacggaagcatagtcataagatggaagaagatgtacgtgcgtcacacccagttctttcaagtgatcaataccggttgccaattgttcaggactcaacgtaccttcttctgtcaatgccaggaatttacctttgtgctgaataccggaagaaggatcgatagaaaaatcacggtgatgcatttcataaataatcgcatctgccggagaagccaacgctgggcgtttatcagctgcccaaccttcgggatcagtcgcattcatatctataattgcggcacgctttccatttactcctacggctttggcgttgatgcccggagtatctcccatccatttatccttaatctttacattgaatgtatagaatttcccaatcaggtctttttccacctttgctgtccaggttccttccttatcggccaccattgaaacggtttcataagcatgaccactgtcaccggtatcaaacaacatcagacgcacttcatcggcagtgggtgcccacaaagtaaaatttgtaacttcaggagtatactccatctctgtcaggtcacccgagcgaacaggatacagctcataagacgcgtactcttttttcgccggagaacagctgacaatcgtagcagcagccactccaatcaaggcaagttcattcagtttcatggtcgttattttaagtattaaatgtcatgtattaattattgagtatcaagcattaagtattagatatgagatattatcgctttactttgtcgggattcttggctatgaaatctttccagccatgatatcctttctctactgtagggcgtcccatttgcagaaaatgacaataagcggcagcaagaccgtccgtggcatccataaatgtaggcatatcctcctttgcaaaatgcaacatacgttgcaacatatctgctacctgctccttggaagcctgaccgtttccggtgatagccattttaatttttaaaggagcatattccgtgatcggtatatcccggctgagagcggccgccatggcaacaccttgtgcacgccccaacttcagcatagactgtacattcttcccgaaaaagggtgcttcaatggcaagttcatcaggcagatagctctcgattatactcaacaccctctcgtgtatatgacgtaatttcaagtaatggtcacccattttacgcaaatcaataatgcccatagctatcatctcaggttttgttccctgtacacgcaaaactccgtatcccataatggtcgtaccggggtcaatgcccagaattatcttttccttgacaggctgtatcactctatcacctccatcagtgtaggaaagcctactactttatcctggaatatcttaaccagctcttcgttcaacttcgttccctgttccagatgccagcgatgcaaaataccggaattttccacttcaaactgaagggaataacaggtactgccctcttcacggtgactgagtacacgaacaatgcgcggtgtatgcaatgcaccagccttttctacttcaggtaaatagaattctttgatccagatcaggaagttatcttcctgtccttcttctacttgataggttgtattataaatcagcatattttttctttcactttgtttcgcaaacatagcaattatttcagaataatgcattatatttgcgccaccaaaaagagagaaacctcgcaaacgttagcgaaggatcaaaaaaggggggttagctcatctggctagagcgcgacactggcagtgtcgaggtgatcggttcgagtccgatactctccacgataaaaaggaatatatcagaagcaggatatattcctttttttactctatctccccacctatcctttataaatccaaaaagattccacaatagaatacttaggaacaataagaaagatgagtaaaaggtcgtatgaaaaccacgctttgctttattacttttcttcttttgcccgtagcaaaacttcgtcctacagttgcgggctatacgttttccaattgtaggctatgcagcccgcaattgcgggacagacagcccacaattggaaaacgaggttttacttatagcataatgacattaacatgaaagctttaggggaaaaagaaaggggcatatcaaattttacatctataattcagccttctataccatgagaggatggtgtttaactccagtaatgaataattgcaggctaaaaaaagatatttgtacgaattcgggcaaagtttgtacaatgcacattaagaatctgtggattagtaaattacaagtataaaaacgttctttattgtctgttttatggtgtaggatgaagcttttatgcatcttcctacaccgcttcatacatcatatatacacctgataatcagataaaaataacaaatggtgtaggatgtaggaactattgatgcaaagtgaaatggttcattcaagcatccacactcaaacaaaccatttcacctttaatcaaacaatgtaatgattttaaaacttatcctattgtaacttaaacgtcacaggcactgtaaacttgcagcgtacgggtacgccacgttgttttccgggcttccatttcggcatggtagaaataacacgaaccgcttctttgtccagataaggatcaacgcctcttatcacgttcacatccacgatgctaccatccttgttcacaacaaactgtactgttacacgcccctgggttccattctcttgtggaatggtgggatacttgatattcttactcaaatactgtaaaagaccgactgtaccaccattgagaaattgcggattttcttccactacttcaaaaatctcatcttctaccggtacatcttcgtccacagtgacaggtatgtgtttcactaccacatcctcaccggtttcttccgaggaggcaaaattggtttcttctacattagcgtcatcatctattattgtcaaaacatcattaataggagtaacttgaggtggaggtgggggagcaacctcaggctgccttgtaagagggatctccatgtcctgttcaaatacattttcgacgatacgaccactcgtgtcaatcttaatatcacgcgtccattcaaacgctacgaacatgaaggcaagtacgactacataacctacaagtaaccacgtgggtctcttgctttccaagtttgctttgggtgtttttttggtttccatagtttacaaattagttactatataatgccttccgttaagaatctgacactatatagatattgttagtaatacgaaaacacttgtggccactattttctgtaataaagatagttgaatagctattaagttgttatcagagagacctattaatatatttttttaatatctgttcgaaaaaattgcttagcaaaaagattatttacgccggaatacttaagaatactaaaaaagcagttacctttgccgaataaatcaatcataaaagatgaaacaaactaatttaaggaaaagcgacattatactgcatacgcttaacccctatgaccctgaaatgcagcgttacctttccctctctaaaagaatcgagcaattgatgaacaatgcggaagatgaaaacgacccatgtgttcctgttgagctcatggcagaattctttgttttgcaagaagaactttatcagaaggcactgaaaaagaacaaagaagaagctaattaacctcccacaaagataagaaggacggtgcatagctgataagggtaatgattatccgcaatctatacaatacggagatcgcatagagatgctacgaagatttacacagccacagactttttccccgcgaccgattaattttataaagagattgggagcgaaatcatgataaagttgtatctttgcaccgttttatgtatttcggaaataaataataacgacgatatgatagataaaatcaaccagcttctgcaagaagtggaagcactgaaagctgccaacgccgaggaactggaagcactccgcatcaaattcctcagtaaaaaaggcgctatcaatgacttgatggcagacttccgcaacgtggctgccgaacagaagaaagaagtcggcatgagactgaatgaactgaaaaacaaggcgcaggaaaagattaacgccctgaaagaacagttcgaaagccaggatacgggttgtgacgatattgacctcactcgttccgcttatccggtagaactgggtacacgccacccgctcaccatcgtaaaaaacgaaatcatcgatatatttgcacgtctgggtttcagtattgccgaaggtccggaaattgaggatgactggcacgtgttctccgcattgaattttgctgaagatcaccccgcacgcgatatgcaggatactttcttcatcgaagcacatcccgacatcgtattgcgtacgcacacttcatccgtacaaacacgcgttatggaagtctcacaacctcctatccgcatcatttgcccgggacgcgtatatcgtaacgaagctatcagctatcgtgcacactgctttttccatcaggtagaagcgttgtacgtagataaagacgtatctttcactgatctgaaacaggtgttattgctctttgccaaagaaatgttcggcgaagataccaagatccgtctgcgtccgtcttatttcccgttcacggaacccagtgccgaaatggacatcagttgtaacatttgtggcggaaagggctgtccgttctgtaagcataccggctgggtagaaatcctaggttgcggtatggtagaccccaacgtattggaaagtaacggcatcgacagtaaggtatacagcggatacgccctcggtatgggtatcgagcgtattactaacctgaaatatcaggtgaaagaccttcgtatgttctctgaaaacgacacaagattcctgaaggaattcgaagccgcttactaaaataagtagagagttgagaattctcaactctcaatttaataagaatgaaagataaacttgttacttccagttattgttttattctcgcagccaacttcctgctgtatttcggattctggttgctgataccggtacttcccttttacctgtccgaagtattcagtgccggcaattccacaatcggtatcattctttcctgctacacagtagctgcattgtgtatccgccctttctccggttattttctggacagttttgcacgtaaacctttatatttgatggcttacttcatctttatgacgatgtttgccggatacattattgcaggctcgcttacactgtttatcatgtttcgtatcatacagggagtatcgttcggaatggtaaccgtaggtggtaacacagtggtgattgacatcatgccatcttcacgacgcggagaaggattgggatattatgggctttcaaacaacattgcaatggcagtgggtccgatgtcaggattatttctgcatgatgcgggaatgagttttactaccatattctgctgttcactagggtcctgtatggctgggttcgtttgcgcttctcttgtaaagactccttataaaccacctgtgagacgggaaccgatatctctcgaccgattcatattgctgaaaggtattccggcaggtatcagcctcttgttgctttccattccttatggaatgacgaccaactatgtggctatgtatgccaaacaaatcgggattaatgccaccacaggtttcttcttcactttcatggcaataggaatggctatttcacgtatattctccggaaagattgtggacagaggtaagataacgcaggttatttccgctggactgtatctcgtggtgttcagttttttcctgctttcggcctgtgtatatcttatcagctggaacaacatggtatgtacgattgttttcttttccgtggccttgttgctgggagtggggttcggcattatgttccccgcttacaacactttatttgtcaacctcgcccccaacagccaacgtggtaccgccacttccacctacctgacctcctgggatgtaggcatcggtatcggtatgttgacaggaggctatattgcagaagtcagcacctttgataaagcctatttattcggagcctgccttaccattgtttccatgctctacttcaatggcaaagtagctcccaattaccataaaaataaattgcgatgagaaagaaagaacgttatgaaaaagtccttgcctggtttcgggaaaatcgtcccgtagccgaaacggaactacactatgagactccgtttcaactgctgatagcggtcatcctctccgcccaatgtacggataaacgggtgaatatgattgttccgccactgtatcgcgacttcccgactccggaagttctcgctgccagtactccggaagtgatatatgaatatatccgtagcgtgtcttaccccaataacaaggcaaaacatctggtaggcatggcacaaatgttggtgaaagacttcaacagcgaagtgcccggcacactggaagaactcataaaacttcccggtgtaggacgtaagacggcaaacgtcatccaatccgttgtattcaacaaagcggcaatggcagtagacactcatgtgttccgtgtaagccatcgcctcggactagtttcggaccaatgcaccaccccgttcagtgtagaaaaagaactggtgaaaaacattccggaagccgacattcccattgctcatcactggcttattttgcacggacgatacgtctgccaggcacgtacaccacaatgtgacaactgcggtttgcaattgatgtgcaaatattattgcgagaagtataaagttagcaaagagaagccggaagataaagaataaatgacggtttcatagcaaaagaaagaaataaatgctaactttgcgctcacgaaaacaaattaataacacttttaaataaaatagagtattatgacaattgatcaattcaactttgccggtaaaaaggcattcgttcgtgtggacttcaatgtacccttggacgaaaacttcaacattacagatgataaccgtatgcgtgctgctcttcctacgctgaagaaaattttggctgacggtggcagtataattattggttctcacctcggtcgtccaaaaggtccggctgacaagttctctttgaaacatatcctgaaacatctgtcagaattgttgggtgttgaggtgcaattcgctaacgactgtatgggcgaagaagctgctgtaaaagctgctgctctgcaaccgggtgaagtgctgttgcttgagaatcttcgtttctatgctgaagaggaaggcaaaccccgcggtttggcagaagatgcgacagacgaagaaaaagctgccgccaagaaagccgtaaaagaaagccagaaagaattcaccaagaaattggcttcttatgctgactgctacgtaaacgacgctttcggtacagctcaccgtgcacacgcttctacggctttgatcgctaaatatttcgacaaagacaacaagatgttcggttacttgatggagaaagaagtgaaagctgttgataaagtattgaatgacatcaaacgtccgttcactgctatcatgggtggttctaaggtttcttctaaaatcgaaatcatcgaaaacctgctgagtaaggttgataacctgatcatcgccggtggtatgacttatactttcactaaggctatgggtggaaagatcggtatttccatttgcgaagatgacaaactggacctggctcttgacctggtagcaaaagctaaagaaaaaggtgtaaacctggtattggctgttgacgctaagatcgctgacgctttctctaacgacgccaacactaagttctgtccggttgaccaaattcctgatggttgggaaggtttggatatcggtcctgaaacagagaaaatcttcacagacgttattaaaaactccaagactatcttgtggaacggtccgactggtgtattcgaattcgagaactttactcatggctcacgtgccgtaggtgaagctatcgtagaggctaccaagaacggtgctttctcacttgtaggtggtggtgattccgtagcttgcgtaaacaagttcggtttggcaagcggtgtttcttacgtttcaaccggtggtggtgcattgctcgaagcaatcgaaggaaaagttcttccgggtatcgctgctatcaacgaataaaaacagacattatcatacccaaaggcagctctttgaaaagaagggttgccttttttaatcttatatcttcacatctacaaaaaataatgaaacgaatactgttatccttcgctttcttgttctctgtcctgatagcaacggcacaagatgcttgtttaaacgacgtagtaaacactctgaaagaccgtatcagccttgccggttatgcacaggtaggatatacgtatgatgatgccgacgatggcagtaataccttcgacatcaagcgggttatcttcatggcacaaggtaaaatcactgaccgctggctatgttacttcatgtacagctttgccaataccgggaaaatacttgaagcatacaccgaatacaaattcctcccccaactgaccgcccgcatcggacaattcaaaacgatgtataccattgaaaacccaatgtctccctgctatgtagagttgatcaattgctacgcgcagtctgtcaattatctggccggtatcaacggcagcgatccgttatatggttccagcagcggacgcgatatgggtcttctgatttatggagacctgttcggcaaactggtaaattataatcttgcattgatgaatggacaaggcatcaatctgaaagacaagaacaaccagaaagatattgtaggcagtctgatggttcatccgctcgactggctatccgtaggtggttcttttgttaaaggaaagggatgcgcagtagccacttccactcttaatccggatatacaggtaggtgaaaactatacgcgtaaccgttggtcggcaggtgcagtgattaagaccaaaccggttgatgtacgcacagaatacctggccggaaaagatggacacgtgaaaagcgacggctactacgtaacggcatctgcacatgtattccccaaagtggatgtcattgcatcttatgactattttaacaaaagcaaagtgctggatgacaagcaaaccaattacgtagtgggactgcaatactggttttatcctaagtgcagagtacaggcacaatatacgtactgcaaccgccatatcggagaaaacagtaatttattacaagcacagttgcaagtgcgcttctaaagaaaaaccttacatgctatggaatacagccgaattctgaaagaaatatacgaagaaatacagccgtatgcacaggaaggcaaaccggcaagttatatccctgaactgctgaaagtcaatcctgatcgttatggcatctgtctgcgcaccatcgaaggcaaggaatatgcccagggagacagtgatgaacgtttcgccgtgcagagtatttcgaaagtattttctcttgccatgagctttggccggataggtaacgaactttggaaacgcataggcgtagaaccgtccggcaatgcattcaactccatctttcagctggaaatggagaaaggaatcccccgcaatccactcatcaatgcaggggcattggtaatggcagacgtcttactctcagtacttgaatatccggaaagggaatatctctcttttgtgcggaaactctgcggcaatgacacgattcaatataatgaaagcatggctgcttccgaacgggagtatggatatctgaatgccgccatcaccaatatactaaaatatcacggcaatatagaaaacgacatcgagcgggtacttcgcttctacttccgtcaatgttccataggtatgaattgccgggaactggcacattctttcctcccctttgccgatcacacaagaccgttcagttttgatggaaccgaactgacgacttcgcaggtgaagcgtatcaatgccattatgcaaacatgcggtttctatgatgaagccggtgagttttcttacctggtaggattacccgggaaaagtggtgtcggtggtggtatcgctgctgtatgcccacgcaagtatgcagtagccgtatggagtccgcgactcaattccaaaggcaactccgtaatgggcatgaaagctctggaattactgacaaccaaaactgcagtcagtattttctaagaacccgaacttttttggcatcatttttgtaccttatactaataaagtattaaagaaaggactgaatatgaatgaacaatccatccaaaaacaatataatcagatagtcagtttactggaatataaacggctgaaagaagctctcgttcagctggatgctttcttatataatagtaatgactggactttgcgtaaccgcctggaacaaatccagacttcctatcagtatatgctgcaatacatgaagctgggaatgaaagatccggaacggcataaattgtatcgtcaactattagccgatacctgggaaattgccgatcagacgcgcatcctattgctggatgagatatctacctactactatcattctttgcgcagaaatcccaaccagttgccgaaggcttatgacctctctgcccaacagaggatactggaaggattctcggacgaaatggctgtatcgcagttggcaaactatcagggcttggacgctatcttaaaacggcatgaagaaacacaccaggttatgtttcttaccacttggagcaacaataactggactttggaagaatttgcccaggcagaagatatgctccgctcggaaacattaccaatcaatgatttatgtctgtttgtcagtgctgtcacacttagtttaatggagtgtttcgacgaacgcaagatcaattggctgctcgacggactccgccatacccatccgcaaatcaaccaaagggctttggtaggacttgtcatcaccctgcatctctaccccactcgcattacactctacccggaactggaagcacgcatttctcttttcagagaagatccggacttcagtaaacaggtgaaccgtgtttacatccaactgcttcgcagccaggaaaccgagaaaatagacaagaagatgcgggaagaaatcattcccgaaatgatgaggaacgtgaatatcatgcgcaacatgaaattcggttttgaagaaactgatgaaaacgaccgtaatccggactgggaacaggctttcgaacaatcaggattgggagacaaaatacgagaaatgaacgatttacagttggaaggcgctgatgtctatatgagtacattcgcacaactgaaaggctatcctttcttccgcgaaccacacaactggttctatcctttcgaccggatgcactccagtattatccaccaggtcggcttgaaccagacaagtgaaagttctgtactctctattattctgcaatccggattcttctgcaacagtgataagtattcattctgtttcaccattgcccaacttccgcaaggacagcgggatatgatgttaagccagatgacgccccaggaccaaagtgactttatggaagagaagaatagcgccagtctgaagcaatacgcagaacggcctgacgttatcagcaaccagtatattcacgatttatatcgtttcttcaaactcagccaacgtagaaatgagttccacaacatcttccaggaagagattgctttgcaccgtaatcctgtgctgaaagaattgctgagtgctcccgaactattggtggctgttgccgatttccatttccgcaaagagcaccctgccgaagcattggagctctaccggatattgatagaccggaaacaggccaatgcggatattttccagaaaacaggcttctgcctgcaaaaggagaaacgctatcaggaagctgtggatgcttatctgaaagccgatatgctgaaacctgatcatttgtggacgctccgccatctggctacctgttaccgtcagatgaagaaattcgatgccgctctggaatactaccaccgtgtggaaacaattcaaccagaaaaccacaatgtgttattctataccgcaagttgcctggcagaacagaaaagatacgaagatgcactacaatacttcttcaaactggactttctggaaaacaactgcatgaaagcatggcgcggtatcggttggtgctcatttgtcagtggtaagcatgaacaggctatgaagtattatgacaaacttctcgcctccaaacctcttgcaacagattatctcaatgccggacacgtggcatgggtattgggaaatatagaaaaagctgccggactctatggtaaagctatggcagaaagtggtagcaaggacgcattcctggaaatattcgacagagaccggaacagcctgctcaagcaaggtatcgcagccgaggaaattccattaatgctggatatgattgaataaaggcataaataaatatctgatgaagaaatactgcattctggctatactctgttgtttcagctatctggcagcagcacagactcccgtggaaaaaggactggaaagcataaaccgggcatccgccgaagcgtatatcggttttctggcacatgatgaattacagggtcgggaagccggataccacggttccaaggtagcggcgcaatatatcgcttcattgctacaggcaatgggagtacagccattaggagacagttattttcaaccttttgaagcctgccggagagaacggcagaaaaaaggacggttggaagtacaccccgattcgattgctttattcagcaaagaagttcatcagaaactcccaatgactaatgtcttgggaatgattcccggtaaaaatgtcaatgagtatgcaattgtcggcgcacacttcgatcatttaggaatagatccggctctggatggtgatcagatttataacggtgccgatgacaatgcttccggagtatcagctgtcctacaaatagccaaagcattcattgccagcgggaaacaaccggaaagaaatattatttttgctttctgggatggcgaagagaaaggattgctgggttcaaaattctttgtacaaacctgcccgttcatttcacaagtcaagggttatctgaatttcgacatgataggccgtaacaataaaccgcagcaaccgatgcacgtggtttatttctatacagaagccaacgcggcttttggaaagtggctcaaagaaggtataaagaaatacaatctccggttagagcccgactatcgtccatgggataaccccataggcggtagtgataacggttcctttgccaaagcgggagttcctattatctggtatcatacggatggacatccggactaccaccagccctccgatcatgccgacagactgaactgggaaaagattgtggagataaccagagcatcttttctgaatgcctggaatctggcaaacgagaaagagtattaaactataccttcagtaattccctgtatagtttttgcacaggaagccccatgatattatagtaacttcccgagatattctccaccccaataaaaccgatccactcctgtactccataggctccagctttatccatcggtttgaagttatctacgtaatatataatttcatcttcgctcaatgtggcgaaacgtacttcagtctgtgctgtaaaacttcgctgccaatcggtagtggttatgcatacaccggtaaaaacttcatgggtacgccccgacatagtccgcaacatctgcaaagcatcttccctatcccggggtttgccaagaaccttaccatccagccatacaatcgtatcagccgtaattatcagttcatcaggttgcatcataggtatgtaggcgtccgctttttccttagcaatgtagagcggtatttcctccccctgcaaagtatgcggataagattcatccacatccggaagaatccgcacttcataattcacgcccaaacctgccatcaattctctcctgcggggagatcccgaggcaagaatcaccttatatttctctaaattgtccaacataacgatttaaagtattaatttttaagcattaagtataagaggagattaccaaccaaaagctttatcatccatccaaagtccctgaactttcaatacttgttctacaacgtcccgaccacagccatagccaccattggcataggaaatgtagcgggagacggtcttcacttctgctgacgcgtctttaggacaacaaggtaatccgcactcacgcattacttcaatatccggaatgtcatcacctacataaagaatctcttcgtttttcaagccatggcggtcacgaaaatcatgataatcatggatttttacggaagaagccatgtaaatatcctcagaaggaattcccaaggccataaagcgtttgcgaacagcttcggagcgtccaccggtaatgattcccagtaacaaactctgtttgcaggcaaggtgcaaagcgtaaccatctttaatgttcacggtacgcatcggttctccatccgaactcatcggtatgacgttagcactcaaaacgccatcaacatcaaatacaagtgcttttatctttttcagatcgtaattgatagtactcactatattcggtttttaaattaggttacctttcaaaaaaaacaatgcttgttttaggataaaactatgcttgttatgtaccaaaacattgcttgttatgcatcgaaacattacttgttatgcaaacgatgtatattctcgctcacaagctgatacaattcctgcatctccggttcatcagcaagcatctccagatgcttattgattacattttcatcataacgtacagccggacctgtctgagcctgcttcggttccagttcatgcactttacgggctgtttcatcaatcaggggtagcatcgcatcgaatggaagattatatttcttcaataattcagccgccagagcatacatgtgattcgtaaaattacaagtgaacacagctgccagatgcaggcttctacgctgctcagaggtagcttcatacaccttttccgaaaggacagaagcaattgccttcaacaattccgtatcttcggatgaattgctctctatgaagaaaggaatcgtacggaaatccacctcgcgctgtttgctgaaagtctgcataggataaaacacaccgtaacgtgaagtttttccttcccaaatgctcatcggaatgctcccggctgtatgtaccagcaaagcatcttccttcccggcaacaatctcgggtaataattccacgaaagcagcatccttcaaagagacaatatagagccgggcatccctggatacttccgaaagttcagtcgtatattccgcctctatcgcttgagccaaggcacatgcagcctcttttgtacggctgtagacctgtactatacgaaaaccattttgatataaagccttggccagattcgttgcgaggtttccggcaccgataaagactaccggcgtatcttgtacactccttttcatcttgtagccagccaatatagaataattccgagaaccagcaaagtcacaggcagcagataggcagacatcgtgccgagcaatgccgttatcaatccgaaattcagtatcagccacagaccaatcaacaccagtcccaccgatttatcacgcttgaagatgagaaatatcaccgccgtataaagcagaaaattatccttattcatcacccacggcagaccaatacttgagaaatgtatcaatttgtccaccagataaagtataccgaaaacaatcaatgtaaccgctgtggccctgtaagtatcgcggttattgtttgcttttgctgcacccaccgttactttcctccgtatttattgatatgaactttttcccattgcagatgttcttcactgaaaggcttacgttccatgcctttgtgtccgatagcaacgacactgagcacttgcagttgtaaaggaatatcgagcacttcgcgcacatattcatcggacggcataccggaagcggtgaaacgttcgcgcacctgcacccagcaactgcctaagcccatatcttctgcctgtaattgtataataatcgaagcaatggaagcatcttcaatccacacatcactcactaacggatcagccgttactacaattgccaacggtgcatcagcaataaattgcgacgcttgcgccttgcaatgtgatagtttttcaagcaactccttatcgtctaccataataaactgccatgcatttgtccgcttggaagtgggtgacatcagcgcagctttcatcagggtaaccacctcttcctgcgtcaactcttcatccgtaaatttccgcatactgcggcgaacttttagcaattcactgaaattttccatatatcatattttattagtaacttatttagcgcattgcgctaaataaccatttaggaacgcaaagatacaagattattttctaaatttgcagtcaatgcctttgaaactgacgacatattaccacgggagtgacatcccggaactgccgggcaataatacatttcactccatcgagttgtttcatatctacgaagcaaccccgggttatacgccccttctcatcgttgcatcagaagccgaaaagcctgtcgccaagctattggcagcagtacgaaagagtgcccgtctgttcccgcccgccattatcaagcgatgtgaggtttatggcacaggagagtattttgatgaaactgttgacaaggagtttgtctttggtgagatgttgcaacggttaacggctgaagcgttacgggaggcattccttattgaattccgtaacctggaaaactccctgttcggttataaatctttccgcaaaaaccattacttcgccataaactggctacgggtacgtaattcattacatagcattgagcatgtagaaagccgcttcagtccctcgcgcatccggcaaataaaaaaaggattaaaaaatggtgcagaagtaaaggaagctcatactccggaggaagtgcatgcattctcccagatgctgcaccatgtctattcttctaaaatacgccgtcatttccccagcagagtgttcttcctacgcatggaagaagaaatgatgaaaggggaacaaagcaaaatattcattgtcacttacaaagataaaataataggcggcagtgcctgcatctattccgaagacagtgcttacctttggttctctggtggtatgcgcaagacgtatgcccttcaatacccgggtatacttgccgtatggtatgctctgttcgatgccaagcagcggggataccgtcaccttgaatttatggatgtcggcctccccttccgcaagcacggttaccgcgaatttgtcttacgcttcggcggtaaacaaagcagtacccgccgctggtttcttttccgctgggagtggctgaataaattgctgaataagatttacgaatagaattattccacactctgatacgtcaatggcggatcaaagtaacgggacatactcttcatattttctctgtaagaaggctttgcaaaatgagtattcataaaataatcatcttgttgtttcttctgttcctgcttgagtgcatcccgttctgctacataattggctgtcttcttaccggaggcatcagagacatccactgtcatacgtgctccctctgtcctgatacttaccgagtgatctgttgaaaccggaacatccaatgtctgataagaatcgatatccagtttgagagttacgggtgtaccggtccattcatagcggtaggttccgctcgcatcgtttttagcaataatcatacgtaatgtaccatctcctatatttacccgactatccactaccttcaattcagaaggaagctgcggatcaatggttatggaatgattgagcatatcaggacgaattcccaggaagtattgattccacacgcggatatgctcgctattactccacgcctgcaggaaagttccacttcgacgcacccatgtctgcccggcacgtggccatgcatccgcattctctgataaactgccgacagcaccttccgcaagtgcctggcggttcatgttcctgaacaaagtatacgcgatgtcagcttgtccgttttctatcatccgctgcatggccataccattattccaaagccatatcgtgccattatgataagcatcatctttatgataacgataccattgctcatgataaggatggaactgttcgtcggactgatcgagtgaagacactccccacggatataccagacgttcccaaacttcttttgtctcatgcatcttcaagtcaggatcagaaaccagatccaacgcatagatagcattggggcggaattgcgcatccccacttccatctgtattcagatgatcatagattgactgggaggctgtgtctacaaaatcctgttcaaaatttgagcggagacgctccgcggcaagattccaacgctgagcatcttcttcacggttcatgtagcgggcaagatccgaggcattcgtcaattgggtataccacaatgcctgcacatccacagcacgattgccacgtggtgaacagggatacttgctttgacgtttggcatccatccaagtgtccgcatccgcatgggtaagataccctctttcgtccgtatacaggcgaagagaagcatccgtggcaatcttcactgaaggataaatttctttcacgaaggcggtgtcacccgtatatttcagataatcgtgcacctgcataacgaaacgaggggttccgtcagtggtattataaagaataccttccagattcaaacgattaggtacacgtccgtaagtaggagatgtggaaatggtatcctgataacgtgcaaatgacgcaagaatatcacgtgccgtatcaaactgccctgtacaaagcactgcacccggcatagaaataaacatatcccgcccccagaagtccgtgaaccagggtaaaccggcatacataccataaccaccgtgctgatgagtgatcaactgatcattggtaagcataatccaggcaagggcatgatccaaagaatccagattggtctttaaaggattatgatccagtaaggattgaatacgctgactacgtgcagccaaccacttctctccttctttacggaaaccatctattgcttgccggctatcttcttccgtaccaaaagcaatcaggaaaccatctgcagcaaccggaacagttatcagattatctgcaaattcaattcctgtctccgctacgggtgctatacgtattacattttccggtgactctttcgttgtatagagtacagaatttccatccttccgtgcatccaccacattttcccccatcagcatgaatgagatctgcttcccttgtacactatccatacgaacatacaacagcttcggttcatccaccagacagaatgtttccacagccttttcatatcggcgaactaatttgtcaggatataccgatgtgcgggcattttcccgaagcaatctttctccatccacatacaaacggtaatcggcaaagatacgtttggcataaatattccagcctgcataccaatctccccaatcatccgtagaggtcattccataatagaaacctccgtttttgtctgtataagaatattcacgtgactgtccgtcaggtatggtaatgcttaattcgttcgtacttaacgtagacaattcttttacattttcactacaagccatcactaaaaaagaagtagctgcgagtaatatacccgcagctttcttcgaaaagcataaattcactttgttgttgatcatatttacagcaactaacctattttatcgtaactaatctatttcattattttgcaaacctgtactctgccatcttccatataagcccgtgccatataataaccaacaggcaaagcagacaaaccgacagaagtacatttttcctgtgtcatcaccaacattccattcacagaatatacttctacgcgtttagcttctccggcaggcagcaccaaagtatccatacctctattgtaatatattaaaggcttttcggcatcaggagcagtagtctcgatacctgtcagagtcggtttaaagttagtaaagagacggaattcatgggcaggaacagcaatagtctgtgtagtacttgatacactcaaaggctcattgtcttgcagtaactcataccatgtaccagtttcctggaaagttacagaaaagttcttatctgccagcgtaaagttgccaacaactacaagagacttgccgtcaatggaagtagccgacaaagtacgtccattgtcccagttagcagtacctactttccagctaaatgtagtatttgaagcaaacagttcaggataggaatgacgtaaatctaaaagagcagcatacgtctcatacaatttctttcgatcagcatcttcaaagtagtcccaacgtatcggcttggggtcggtacgaaaaccaccttgatcatcatatccagaaccgtcgctattgttgtttatagagaaatcatatcctaactcaccaaattgccagatcatctttggtccgggtacggtaaggaagaaggccgcattggtggctaaacgtttggtacgggtagagagattaatattacttcctgttgcagggctcattccggtatttgtactcgtagttgatgctattactccggtatttccccatttccaggctttaaaccctgtacgttcttcatcatgactttccatatatcccactaaactaccggcaggcatacttgttcccgcatataaaccactgaaatcattttctgtagtccatcccattgccgtttgacaatatgagttattcatattacgccacaacaagatacctgcttctcctaactgcttttcttcactagtagctgccaaatgttcaaaaataacataagcacccggttgccgcttttgtacggcagccgacatgcgcttcaagttagcaatacgtgcattatccggtccatttgcccagtcattctccccataaggagtattagagaaacctttcgtaaagtcataacgaaaaccatcaattttatattccgacatccagaaaccggccacactatctaccagagcacgggtatattcactgtcatgattaaaatcatatccccatgaaaggctcgtattcttgatatttgattcttgattataccacggattatcagcagagggcttcccatctgcatccttatacagaagatagaaaggagactgaccaaagctatgattcagcacaagatcgataataacagccatcccttgactgtgacattcatccacaaaagctcttaaatcattctttgtaccataatacttatctacggcaaaatagaatgaaggattatatccccagctcgtgtttccttcaaattcattaacgggcattagttctattgcgtttacccccagattcttcaagtactccagtttttcttttgcagcattgaatgtatgttcttcagtaaaatcacgaatcaacatttcataaataaccaattgctcagaagccggacgttcgaagttcttcactttccaattatatgcagtctggccagtctgtagaaccgaaacaatgccttctgcctttccggtcggataaggtttcaagttcggatatgtcgtactttcaatatacgaatcattccatgggtccagtactttatcagtataaggatctgcaatataaatagaaccatctactaaatactggaaagcatattcttcaccttttgtcagcccggaaagagttatccagaaatattcaccatcttgtttcaactgataatccgatttaggagtccaatcgttaaagtcccccactacatatacataccccttttggggagcctgcaatactaaagttgcttctgtatcactaatatagttaataccgggacgcactccttggggcattttctctgaggtgcttgtcccattcagtactgttacttcttgtgtagcagaaacagttttaccattggctgtagcttctgctttcaacgtatatctgccggcagttgagaacgtgtgagatttagaaatagtagtagcattagcttcagtagctatctcagtagcacctacatagagttttagagttgaagcaacagaagcagaagccttaattgtaagagcagtattggtaatcaaattctctttctcggcaggttgatcaaaacgaacggttaaaccggcagtatgtacatcaacaaagatatctttgttccccgtgtccttgccttcttttgatttatctgcactacgaaaaacaaaagctaactgtgttacagtttctccatctttgacaccataatattcacgaatattgggggttattttcagctgccatttatcatttcctaatgaagtcaatttatacttcgccgaattatctccccaagtgggggcatattgccaaactgtgttcccaattgtcactcccgtatgcgcatatacatcaccggtaaagcctttcaacccagccgtacccttcgttgcatcaaaaacaatggtgacttcatcattctccgttggaaaatccggagtagtagttactatttgcgcctgcatagctaaaatagctaacaagcaaataaaaaaagcgtagagtcttttcattcggtatcaatttatagttaatggttcaaaagtacagtagttattccggattatcaagtgcttgaaacagaagaggaagaagaagtaatgcaaacggttgcatgaatcagagcatacactcctgttgtgaatacaaagcaagaatatatcagattttgtttcttaaaaaggaaacttctttgtaattttgcatcgataaacataaaaccatggaagaaaatgcaagatttaaagtagtgctgtctaaagaggctcgtctatttttaaaagggttgagttctaaaataagcgacaaaataacctataatattcgtaaagcaacatctgtaatagatcctgtgctattcaagaaactggatgacacggatatttgggagttccgaacccaatacggaggcatacaatatagactattagccttttgggataaagtgaacggcacggatacattggtcatagccacccatggttttatcaagaaaacgcagaaaactccacccaaagaaatagcgaaagctgaagagataagaaccagatattttaacgctaaagataagtgattatgaaagaaaaagatttctatacccttgaagaaatagaggatgaatttataggtgtaaaaggcactccgaaacgtgataaatacgaagctgacttgaatgcctttctcattggtgaagccattaaacaagccagggaggcaaggaatcttactcaggagcaactgggtgaactgatgggagttaaaagagcacaaatatcgaagattgaaagtggaaaaagtatatcattctccactattgtaagagctttcaaagctatgggagtaaataccgccagtttagatttaggatctttggggcgagttgctctttggtaaaaggggagatttaaaatagcagacttttgcaaaaatttagaactagtccaaatcttttctctcctaattgagaaaagattggtaatggagatatggtaaaatgagaggggctatccagcacaacaaaagcctgtccacggaaataatgctctggtgataacacctcaacaagttatcggttaaaaaggagtttttaaacaggctttaaacttagtagtaatgactcgattactactaagtggttgaccgccctactaaggtatcctctcctttagtacaatctcctcatcaccctttatcaaataagtatggcaacagtttgctgaaacaacatagtttttagtaactactattttttctcctattttaccaacaaactgcaactcaatctcttttcctgcaaaatctcctctatcaagatctgaagcgatggtatatgtgttaaattctttcccccagttaagaacatcccgcacttttcctgtagcaacttctataacttcataactatccaatacgacaaatgtatcatcttcgtattttattttaactccaatactgcaaaactcgtcagtacaaataacctcagaacaatcctcggcatcactgttatctttatcgctactacacccggtacataaaattgcaaaaaataaagaggcaaaaaataataagtttttcataagtaatatatttttaggtttctacttatatagtaaatgctcccaaagcaacaatactgcattctataatgcaaaaaaataccattctcatagcacacattcttgctatagaatgcatttattgtatttttaagtctactttcctactgttattttctcagtcaaaatttcatctccgataatgacacgagttacatacataccagaagtccatcctgaagtatccatcgtataagataaatctgtcatacctttaacttctaaaacttttgtcccataaactacattgtatacttccaaattccagttcagaccattcctcgcatttatcacatcatcagtaactaaccgtatttctttaatattctctgaagaagaaagcactttcaatgaataagcagaagctggtgcatttccgttaccagtataggaaaagaatattattcgtttctttttacatacgccttcaccatcaagtataaaagcaaaaggtaaaccaccagaacgatatggtaattgaaattctaaagtctttgttggccgatgatagttccaaaataaaggtttatgagtaattccacctgaagagtcataatagatatctttatcatagtcactgttaaaagttacacggaccatacaaccttgatgtacaaatgtagagttctctactctgccacttatgcttggatgattaaccccataaaaaggacaagcctcttgtatataggttgcataaggataggattttgtatcagatataacttcttttgataaagtcaataaagtatttccattatagactatcttagctactaaatttgcattgtaaggataataatatttattttttatagtgcattgattaggtactggataattagtataaaactgtggtcgtggtgcactatttgcttcagttggatattcccataccaccattgcgttagctggcaaattctttatataataagtactactatcacaaataaatttagttcccactatttctggcatcaattctcttgcttctaactgtgttataccagtattattcgaatctaaccaatcctttaatcttcgagtagctgtatttccataatcccaagacttatcaaaacgtccataatacatagtcacaggtgcacaattagaactgccaccatgtaattgccccacaactaaatgattttgattcattaatggcgacccagatgaaccactttctattgctccaacatcaaatgtaaccccccaatgcgtatgtttctgtgtcgttgaaataatattaccattattatcagtccaattctggattccattgtaacttttaactgcatcattttccacggatattttctttatatcaccacgcggatgatgaataccaacggcattagctgcaggagtagtacttttcgtccatcccaagtagtatggtatatatccacttacattcctaacagactcagataactccaacaatgcaaaatcagtataagcattattagcaataagttttgcaccggcagagctcggcgagttatatatattagcattagaacaatctggactttcataattccaatacaatattaattgatttatctgatttactccttgggaatcatagttcaaaaaacaatggtcagcagataaaaaataatctttctgtgaggtgctgttaatcaatgctccactacaaacttctgaagttgaagcattatatatacaggctacggctcttttttctttttgccaatcaattccaagtggacaattaacattaatattgcaagacaaagatgtattaaagatcgaacgagttacaatattactttgagcagcaagaacatttttataaatatagccaatcttctgaacagaaataattcctgtttctactccaataggttcataatattcaagtacaatatcttctcctgccacaaatcctgttgcaaaatctacaggaatttcccgcgtacctttattattaatgcttgtaaaagcccctatacagaatgttttatctgcattataaacaaagaatttagccccctccggtatccaaaatttatcatagctaacagtcatagcctttgctcctgatgcatgtagctgtaaacgccaaacccgcatactatcacccacgctttgccaatgaccagaattgtgaagattgtaacttacagcaagaggtaaaccaacacggtaagggatatcagcatccgcaaacaaactatcctcatgtaatgcttcagctacatcaggaataggcaaattaatcacatcacccgaacggacagagaataaagcagatgaaaaacttggaggtaattcattggtgctaatttgagcatgagcactaattgtgaagattgcaataagacataatgcaaaactcttcaataaagcttttgttttcatagtattatatttttgttcactaacaaaaataacacatttgtataatataacaaagaaaaagatgtggacaaaaagcaacaagataaagtaatacagatcaatagattaaatcaaatacagaactttttagtggacaattaccatacctttttacagcaacaatacagcatttatttttatttactatccatatgagataaaaaagctcaatactttcacctcattgaacatccgcatatcttttttcaatattcataaagttctccactaccctccaatattcttccttatcatgtggacgtggttgccaatcaggatcagggctattactcacagcttcattccaattagtatcatccataaacttatagtcaacagtacaagaggataattctcttattggtttaaggaatatatatccatcgaacaaatcggatagaataaaatctttatgccccattgaataataactataatcgtgcagttcaccaatatgagaacctttcaaatcaaagccaatggggttattctgagatttttccattattagttctaactttccagccgctggggaaattaatgttggttgctgattaggataattaaagaaaggctggtgcaaagctacagatactactttattgccatatttatcgtacagcaaatttcctaaaaaacgattctcataacgtacaaaaccaggagaagtataatcataataaggaaaacggtaggacgtaaatgcatgaatagtcccagtcagaaccaatattttctcgtgaacagacaacacttcacgttccaacaatgtacaccgaaagtcttctgtattccctaaaggaaacacttgcttcatattttccggagttctagctccttcaaacttttcccaattgtagcgataactaatatttaaaacacgaaactttttcgcttgctccggtaatgagtgattccattcccaagctgctttatagagattcatatactcaactatagcccaacgggtattataattgaacatcagttgacgagctaaattctcattatatcttggtgcatttatcaatgaatccaattgcttctgatcctcatatgctccaaattccatacctaacatatagataccattcgcatacaacttcggtatcatttttttaacgaagtccaagttttccttaacaccatgatcttcagccaatagcacgatatcagcatctttaaacttagaaatcaaataatcatcaggcgacatatctgtattctttttatcacaaatacaatcttttctatcagttcctaaaagaaataataacggattatctaaacgcttattccaatccacttccgtatgcgcagctcccggaaatactttagacacccacattggtcctttccagcctttcttcctcatcaatttgtccagttcatcctgataaggaggataataagcatctaaggtagcatctcctctatccatataaattatacgactgttagccgtcggaaggttctcatcaagataattcctaaaagctctcgaccattggtccgctttttctttagatagttccttgcttaatatcatgggaacatgagtcgacatacatgcagcccctccaaatacttccgggtattcacaaagtgcatatagtgaaattagaccacccatactggagcccatcacaaaagtatgctcaacactcttattcgtagaatattctttatcaataaaaggcttaacttcttctaccagaaaacgaagatagttatctgcattaaaactaatatcttccggcaattgttcatccggtaaatagtttaatgctttttggggaaaataatcttcatacctcgtttccggaatactcgctattcccacaacaatacatggttccattttcttctcagacaaaagttttcctacaatttcatcaattccccattcttgtttattccatgtagtatttgcatcaaaaagcatttgcccatcatgcatatagaggacatcgtatctttctcttgttgagtaacctgtaggtaaccatacgaaaacattgcgagagggaacaatggtagagttaaatcgagaatattctataagtttccctgatgatacagtttgttgagcaatagtccattggcacagcaacagagataatagtagaaaaaaaagtcttattttcatacgctaaattataatcatctcctattaaacagagattactaaatatttataaaacaatctattcacagtccctcccattaagaaaaagagagtatcttaataatcactctctttttctatattctcctgtagcacctatttcttctaaattacttcaatccaattcaagcattaaaaatattatgagggtaatactttttcataactcaacattataattcaagtacaagcacttctttaggttgtaaatgaagtattcttcctaaggacacattaccgttcgtcaacacattcttcgaactagtcttatctcctattacttctttataaggagccaagtccaaatcaacttctttatttattccattcattataaccagtatacttcttccatcacaagaacgctcatacacatatacattattacgaggcataaaatgtttcatcttacctttagaaataacatcatttcctttacgccaatgcagtaacttactcataaaatcaaaagcttcctgctgcatagccgttcttccattttcctggaaaacagaaattgcatctcctttccaacctcccggcatatccggacgtacatacccaaagtctattttattactaccagacattagtaattcctgcccataatacaattgtggtatgcccggaattgtcaacaacaaggtaactgcctgcttataagcattcaaattttccggggtttccaataagaagcgatccgtgtcatgattttcaagtaaacgcatcacattgttaatgtcaggatagcaaaaatcataagcaaaatgttcgaaaagaagctgcaaaccagtatcccaagaagtttcttcatggaaaactttaccagctattgttcgcaaacgaaaatccatcacagatttcagctttgtattagctttctcattaagcacactattttgttgccaatatgcagtacctacagggttattgggaatcattacttcacctacaatattgaaatttggatattcctcaaaaacttctttacaccaacgaaccatcatatccggatccggatatacatatgtatcttggcgaataccatctaaatctgcatattcaatccaccagattgaattctgaatcaaataatcagcaagaaaacgatttctttgatttaaatcgggcattgtaggcacaaaccaaccatccgtcagttcctgcttatctatatccgaagcataaggatcaaaaaatacagtcttattatgattggtctcgatatatttatgtgaattattaaaccaattctgcattggtggatcaagcagccaaggatgattggttccacaatgattaaaaaccatatccattatcagtttcattccacgttgatgcatagattccgccaaacgaacataatcttcattagttcccaaacgaggatctattttatagtaatccgttgcagcataaccatgataagagccttcacccatatcattttccaaaacaggagttgtccagattgccgtaatccccaagctatccaaataatcaagatgttgcataataccagctaaatcaccaccatgacgagcatttacatctctacgatttactgtataaggatacttcatctgtatatagtcattgctttcatcaccattggcaaagcggtccggcattaataaatatacgacatcagaagaattaaagccaatcctatcttctcctttacgttggcgttctttcaattcataagtataattcagcttacgttttcctttaacgaattctatctgaaatttacccggtgccgcatcttttacatctaaatacaaaaccagatagtttggactctccattggacagacttccttcaaaacaactcccggatgatttatttcaggtttatatgttgctatatttgaaccatataccatcaactgtaaacgggtattcttcatgccagaccaccaaaaagcaggttccactttttctatcttctcatttttctttcctgaataatgtgaagagagccaatcagaattatcctgtgaaggaataatagaagattcaaacttagaatattcaataagtctttctgacgacatgatttgtttagcaaatcccaattgacatagcaataaagcaaaagataaaaataaagttttagttttcatcatacataaaataaaagatactatttacaaaggttgaacaaacagactaaactctttcattgcaggaagaactttgcccgtatgattatcaaaaagcccacgattaatccaaccttctgttacattattaccgcaagcgttttcctcggggaaccaccaaaataatcccgtcacgttggcatgacgacgtaattcagccacaagttcgtgagtgaatatgcgctgtccttcagtagttataggatagaattcagaatgttcatccgcactttttgcccattggtcattctcatgcgaatagtaggcggcagtctccactatcatcacctctttatcaggaaagtcaacagcaagagaatcgagcgtagcagcaagtacccccacggctttatgccacataggataataactaagccctataacatcgtaatcaagctctcgtaaatggttatagtaagttttagttttgttccactctcctgctttctccgtatggatgattatctttgctttaggacaaatttcacggcaagctttggcaccactttccagcagcttcacaagcaaatcccaattttccattccaagcggatccacctttgctactggccacaacatgccgttggttatttcattacccacttgtatgaggtcaggagaagctcccgctttcaccataacctcaagactatttttagtatattcatatatactatccggcaatgaagctacatcaacattcttccatctttcaggcataaattgcttaccaggatcagcccatgtatcagagtaatgaaaatcaagcataaattgataaccttctttttttatttgctgtccaaatttagtcacataatctaaatcttggcacactccttcacctttgtgttcaacggaagcttttgaagggtcaacaaagagacgaacacggatggcattccagctttgctctttaaaatattcaagaggttttattacctttcccttttcattacgatatatggttccagctttttcataacttggcaacaaagaaatatcaccacccaagagacgttgttgagcatgaattccaacacataaagcaaacaaaaataagataacgaatactgatctaaaattcttcataacgatattagtgattgtttcaatgaaaaagtaaaagccctcttccccgtttttcaatgcgagaaagagggcttctataaagtgccaaatagtcttaaactttaaaattattataaataatctactgtttaccttaactagttagcggcttcaatcgtacaataagctttgccttcacaaaggggatatagattgatagtatatgtaccagccgttgcaatcttcagattagcaccattattggtcgttagattttcgctagtaccaccccaactaatatcccaatcatcattggcacggaattttaattcatctgctttcaactcagtagtgatggtccaataatgtattgtacccttgccttcttcagtatattctaccaattccatgtccgtgtctgcatcccaaccactgggagtagcagggccaataatacctatcgcgatgggagtcaaagtataagttttctcattcaagtcaacaactatctgatagaaacctgcctcttcggtcatcattatattggcagcatcagcggcagtgctaaaatctgcaccatagttagtaccattccaactgtcctccgaactgaacttgaaacctttctgattaaggtacatataccccttatagacattattgaattcaggacttgccatcacatcaatatgtttccatccgtttgcatcaccagccatatagagataagcagtagcaggagcaactgaataaatgtaatttacagcatcaaatgtaactataaaatgtcctttcccagtaatgacaggagtttccactttatatacgtcacccgtccaaactgcaaagttttcagtcttgtcatcaccattcacacgacaaccaatctgtccggcattagcaccatcccaaccagcagctatgtcataagcttcatagagtttgaaatagttagagctttcattcttagtttccactgtagcttgaaaaattccctctttaccttcaaccggtttcatgattacaggattttcaacatcccatccattactctctaccaaatcccccaacaacatatacccatcagctgaaatttccggagtagtaatcggagtaagtttagcttgagaagtacctgaagtgtttaccgcttcaccgtttttcaatttaacagcaacattcatatttacattgagtacacgctctacatgagcacggctgaagaaagcatcacgaactacagaatcaagttcaagagtattcaccttcacaatattcccttctttaaatgccgcattgatagtcacaccgttaatatttatgctgttcatcttaatagaagccacctctgaattcgatgaagagagaacggcaatttccacagagtctgtcttttgttcttccgcttcgatagtactgtaaaacttatccatatccacaactgcatcggaacctgcggcaaaactgatttcatatttagcggccgcttcttcaggagaattggattgggggtcagcccaatccgtataatcttccgtacaagcacctaaggtaattccggcgaggaatatacctgcgagtatttgatttttcttcataatgtttttcttttaaaataagattatcattcaggttattttacctcacccgtatctacaccgtcttcagtagcacctacagtaagatagagtttctggcccgctccagcatttacgctgtattcagaacccatatcagtgttccaattgctggcgatatttgcattctcacgccagaaaactttaccctccaaaagcgtaaattcagttttccaccaatcaaaatcacctacttgagcataggcacgtagttcacctccagatacaaattcagcagatatccattgaccagtattatcagcgggagcgatcatcggagctgaaggagtgcctggagtaaatcctccattagcatcacctgtaaccagaagttgtgcaggataaaaagtcagtgtgtaatcaatagcttcaccattaatcttacccttaatgtagagtgtataccatccaccatttttcactttcacattaccaccattgtcagaaacatccgcaccggcttgatcatcaatagttttaaaatcggcatgacccagccattgttgaggataagttccccatttgaattcggcatcattaggaaggtaaactattgtaaagaagttaccagccataccattaataagcgccattggtctccaagttgtccaagcagttcctatactcgaaccgcatacatagatatcctcaggcaatgtaatactcggagcctgataagtagctatcacttggatctttataacattagagtaacaactccccaactccataccattaacattggcatgtaagcgtacatagaggtctttcacttcattagaaggatatgtcacaccttcattggcatcctgaaacatagtaattacagcatcattcaatctactacccgatactttaatggtagcagaagtcgagcttgccacaactttgtacacaggttcttccgcactgaaatcttcaaaagaaatctccacatcatagttagtactcaaaggtatgccaccataatcaggttggctggtagtaaaagtgagttgatcagtagtcagcaagtccaatacattattggctgcgttggcaggcatattcaatacaaatcctgtagtattttcgtggaatgtaggattgctatccatatctttctcacatgaggtgaccaacaccaaagtaagaacgggcagcaacattcctagcagtatctttttcatattattgtttcgattttaaaaaattcgataataaattctattaataacgcgggttttgagtcaagttctcattgccattaatgtcatcggcaggaataggatatacgttaaagaaatcttccacgctctttccttctgctacaccacccttaaaatcccaaacgtatttgtcacctgtgaaaaggccaaaacgaatcaaatcactacgacgacggccttccatatagaactcacgacaccattcatcaataatatattgttcggtaatggtagcaggagtagaagcacctgcacggctacgcaaaacttcaatatcagcacgcgcttgttgcgggtcaccagtcaaacggaacttagcctctgcacgagtcagatacatttcagcataacgtatcaaaggaatatccacatcggggaattcattatgtgaagtcgctgcaccatctgtacgaatgttactccacttcacaatagaaagaccggagttaaagcccgcaatttgttcagcctgtaacttacgaagtccgccaccacaacccgaatagaacaatgcacgatggtcgttagccttcttctgcacatccttggtagtagtacctgcagcttcatcaagagcgatgatctgagcctcagtagctccatcgggggctttctcagtagcaatcggacaatcttcgagcgtagagaagaatttcttaaccaaagctgcacgggagaagttacagctccaaccattggaagtacccatataaggcattccagtgatacgggtagaacttaccagataattggcgccactataacattttgtttttgcaccatcctgacggataggcaagatgatttctttcatagcttgcggattttggtcattatcagccataaacacttgctcataaccagtatagccattcttttcagctttagaaagttcatatttcccatcaagcagatcgcaatagtcaatagccttctgatagtcttttaccgcacctttggtataaacagcagagttcagagccaaacgggcatggagcatataagcggcacctttatcggcacgtccaaagttagaagagttattgaatgcacccacttcggcaagatccggttctatttcggtcaactccttgtcaatccagtcataaagttctttaccagctttctctacaggcagttcataaatatcgtacgtagtcttgaaaggagcctttccccaaagatcgaggaagtaccacatatggagggcacgcaaaaagcggacctcggcacgatactgtttatagtcagcctcttcagccttatcctcggtgttggtaagatagaagttacagagcgtcacatcgaaagccagacgctggaacgtccattgcacgcgaacagatgaagccgtccagtcaatattggtgatttgaggaatatcagcgtcagtctgccaagcccaaaggcattcatcggtacaaagttcttgtagattgaatgtagtacggtagaatccgctttcaccttcatcactactgatatctccactaccggcaggacctttctggccagtcagacccagtgtactgtagattttcgccaacagttccatatctccatacgatgaactggactgcggatcgatagacgaaatattcaagtcgttgacacacgacgttgccactccacccataaggagggctgcaagggctgttttcaaaaatatatgtttcatcattatatgcatttaataggttaaaaattcaggcttaagccaacttgaatgctgaaaggacgcggataaggattggaatcaataccgcttgctacctcagggtcgatgcctttatatttagaaataataaaaggattttgagcagtaaggaatgcacgaccagagcatgtttcatgaccagctaccttaaataatgcagggaaagagtaacctaaagtaatgtttgagcacttcagataagaagcattacgtacgaagtaatcgctcaaataattatcgttacctactcctacaccggtaaagcccaatgctacagcctcggcagtagagttatgcagggcactgttagaatacaagccggattggctgaccattgcacgattcgacaagaaatcgtaataaacatagttaccaatagaagcacggaaagacatactcaaatcccagttcttatagaggaatttagttgtaagacccataataacatcagcagagggtttcttgtagaaataacggtcaccattgtcaatacatccgttaccatcacggtctacgtacataccttcaataggtttaccattctcatcatatacttgctgataaacaaagaatgagttagttgctttacctacagtatttgcctgaatcaaggtattgttaccacggctgatcttatctcccgaccatgcataatagcctgcatcaccatccaccaagtcagtaatttcattatggttccaagcaatattatagcttacatcccaagtaaaatctttagttacaataggtttggcattaatagagaattccacaccgtaattcttcagcgaaccgatattctttgttaactgagaaccaaactgcatacctacaggaatagtgatagaattcagcaaatctttggtttcgcggtagtaaccatcaatattggctgtgatgcggttattcaggaagcccaaatcgataccggcattataggtagttgtagtctcccacttcaagtcaggattgtaagccgacggacgcatcgtaccatagtaagtatcgccaaaaggatactgagcgaaagagtcgcttgaagtataatgagtttcataaccgaaatcagagttaatatcctgctgacctgtcataccccatcccaaacgaagtttgaattcattccaccaagtaagattcttcataaatgcctcttcattgattttccacgccaatgccacagaagggaagtaaccccatctattgtcttcagagaaacgagaagaaccatcggcacggaacgtagccgtaagcatatatctgttgagcaacgtataatttaagcgaccgaagtaagaaactaaagagttatgcgtagcccatgcttgttcttctctcaatttggcatcatgaggagtaccatcgtaaggatcggtaccttgaccatagtcgtaaccactgcggtggaagtgactttcttcggcaccaaccattatatcaaaattatgggcgcctatttccttaacgtactgagcataagcattagctgtgacactatatttataagtctgcgttatgccattccaaccaaagtagttgttagaataagaatacttggagattatatcgtcctgcttactttcagtatactgtccgccatagctggcatgcagacgtaaatcttcaaagccatgtaccttatagtctacatcaaagttacctgtaaagtcattggcaacagcctgtacatccttaagtttcaacagagctaaaggattctgaggagcattgggattattagtatatttccattctgcattgaaatctttaggtgactgcgaatgttgaaaataaccatcgaaaaatggagcacgggcatcatcagcatcgaagtataccggctgagtgggatccattgaaagagcagaacctattgcaccgcctgcatcagcataacggtctttctcatacatatacttagcgttaatcttcaaattgaggtgatcatcgaagaaagaaggagaaagattcaagccgacattggcacggcgcatccatgaggtttcaacgataccgtcagaagcgttatatcccaaactcaaacggtaaggcatatttttcaaaccaccggatactgatacattatgactatgagagatagcagtgcggaatatttgatcttgccaatcagtattagcgttacccatacctacttcaccggctttatcgccccagatgttattaacaagttcacgaaactcatcaccattgagtacatcatactttttctggatcatagaaattgtcatgtcaccgttgtaagaaaccttaggggcagaaccactcttacctttcttagtggtaataatgataacaccgtttgaagcacggctaccgtaaatggcagtagcagaagcatcctttaaaactgtaaaagtttcaatatcattcggattaaccatagccaaaggattactcattccttttggagtattgttatcaatggtcaaaccatcaataacaatcaacggatcgtttgaagcattaagagaagatccgccacgcacgcgaatctgagcacctgcacccggagtaccacctgcagtgataacatcgacaccggccacttttccaaccaacatatcctgcgcattgttggtgatacctttactgagttcatccggtttgattgccgttaccgaacctgtaagatcatctttcttggtacgaccataccccactactactacttcactcaataattctgcatcatctttcagtgtcaccatcaccataggagcagctgctacttcttgtgtctgataaccaataaaagatattgttaatgtagcacctttaggaacactcaaggtgaaatttccatcaaggtcggtgattgtaccattagaggtatttcctttttctacgatattcgcgcctatcacttccaatcccgtagcatcttttacatgccctttcacggtaatgttctgtgcataaacgccaacagacaagaataaccccatcaataggggaagaatcattcgatagattctaagattaacttgcttcatgcatttaaaaaattaaagttaacaatattaattacctatattatatattcgaaattatctttcgattactttctcttttataaggtatctataacatgacgcaacaaaaatatgctttattaaaatattaaaatataagaaatataagaaatatgcaaatgcaacagtgcaaacgattgcacagagttgcaccgttgcgcaagataaaaatcttcattttaaagagccccatacacaatcattttcaagaaactaagagataaaaaatatcaaaacaatagtacctacacccatccagcatccacaatgatagtatattcctcattttcgcaacatactttagtttacaaaatcacaaaccagcatattcagtgaataaagaaaggataagaatacactattattgcatataattgcagttttgatagctacttatgcagaaaagggttactacttacgggtgaaagggttactacttataggtaaaaaggttactacatataggcaaaaggtttactacttatcgccaacgcacttatctgtgtcaggtttttcacctataagaacggttttagagagctatttcgttccagaacaaatgtaacaatttcgctatccaactattattctgacatttaccgtttttcattttcatatttccatctcggtagacatacggacagaaacagtgcattctcagtcaactaaaaatacaatttgtcacaatgacacttatccctatttcccgttttttcattattcactctcctaattaccccgaaatcattgcaaaccgcatactgctgttcattaggttcagccgatatttccggtgcatgagttaaaaccttcccgacgattgcatctatatacccaacgccacccatatatagatgcagcctcctagtgtttcgtgtcctttatgaacgtttttcggaggaaaagccacactattctatacctgtctgatgccacttctttacgaataataccaagtatttattaaattcacattgccaatttacgagtgaccacaattgtagtacaactgcttcacattgatggagcacatgaatcaccattatgaaacaagtgaaccacaattgtggtcattctaaataaaacgtatattaatcaaaagaacattgtatatcagcggaatacacacgtgtcattaacagaaagaagagtaggcgttatccctgacaaagcgtgcaagcaactttttgcttacacgcaaataaagttgctgccaccacgctttttcaactatttatcagcaacttacagcaaatagtgcaagcgtgcaagtaaatatgacgttaaacttatagtaagccaggcgggcaaagaaggtaacgaggggacaactaccttcataacggtatagtaatgaataagactcaccacagattacacagattcacacagatttattaatctaataatcagcaaaataaaatctgtgtgaatctgtgtaatctgtggtgaattaattcataaccctacagaaacgaacaaattttgatgcggttgccctgattaaatttccctttttaatactgaaaatagaacataaataagtacttttgtgtattgatgtataaaaacaggcaaatatgagcaataagatttatcccataggaatacaaaatttcgaaagtctccgtcaggatgattatttctatattgataagacggcattaatttatcaaatggtaaaaaccggccgttattacttcctgagccgtccacgtcgtttcggtaagagtttgctcatctcaacactggaagcatacttccgggggaaaaaggaactgtttatgggactggcaatagaaaagttggaaaaagactggataaagtatccgatactgcatctcgacctcaatattgagaaatatgacgcaccggagagtttggataatatacttgagaagtcgttggtagcgtgggaaaaactctacggcgccgaaccatctgaacgctccttctccctgcgctttgcaggtattatagaacgtgcctgcgaacaaaccgggcaacgcgttgtaattttggtagatgaatacgacaagcctatgttgcaggctatcggtaacgaagagctacaaaaacaattccggaatactttaaaggcattttatggcgtactcaaaacgatggatggctgcatcaagtttgccctgctgacgggagtgacaaagttgggaaaggtcagcgtgttcagtgacctaaacaacttggacgacatatcaatgcggaatcagtacattgaaatctgtggggttagcgaacaggagattcattctaatttggaaaatgaaatccatgaatttgcagctgcacggggagtgacgtatgacaaactctgtgccgaactcagagaaaactatgacggttatcatttcactcataactctatcggtatatacaatccattcagccttcttaatgccttcaaatataaggaattcaacagctattggtttgagacgggaacacctacctacttagtgaagttactaaaaaaacatcattacgatctggaacggatggcacatgaagaaaccgacgcccaagtactgaacagcatcgattctgaatcaaccaatcccattccggtgatttatcaaagtgggtatcttaccatcaaaggatacgatgaacgctttggtatgtatcggttgggctttcccaaccgtgaagtagaggaaggcttcatccgctttctcttgcctttctatacaaatgtcaacaaagtagaagccccgtttgccattcagaaatttgttcgtgaagtggaatcgggagattatgattccttcttccgccgcctgcaaagtttctttgcagataccacttacgaagtaatccgtgaacaggaactgcactacgaaaatgtactcttcattgttttcaaattaataggtttctatacccaagtggaatataataccagcaatgggcgcatcgacctcgtattgaagacagacaaattcatttatatcatggaattcaaattggaaggtactgccgaagaagctttgcagcaaattaatgacaagcgttatgcacttcctttcgagatggatgaacgaaaactatttaaaataggaataaacttcagtgagaaaacccggaacattgaaaaatgggtggtagaataaaaagagggcatcacctcatttgaaagtgacgccctcttttctttactctgtaacagacctcagcacaaacttaccagatttcacccctttagccttagcctcgaaaataatttcaccgggctgttcggtcatttgaacaatggctgtcagctgaccgctgaaagcgggcatcttcggcaagtggaataaatcaagtgaagttgcatctccattagcagcagcacgataacgccccgcgcctttcaccgtaaagtttacaagacgattatcggcaggacaaaggtttccgtctttatcaaccacacgaacagtgatgtatgccaaatctttaccatcggcagtgagttggtcacggtcagcaataacttccagatgatgaggtttgccggcagtacgaactactttttcttcagcaggtttgccggaagcatcgtaagccaccactttcacttcacccggctcataaggaacgtccatccacatcaggcggtaacgacgctggagggcaagtgtatctttgtcctgaatagctttactctcttcggctgtcagtttatgctgtttaccatagctttttccattaacgaaaagttcggcagcaggatagtttgtgtaaacaaagacaggagtattctctccttccctacccggccatgtccagtgaggaagtatatggagtgtattcacattcttattccaaagactacggtacagatagtagcggtcttttggcaaactggcaaggtcaatgataccaaacaaagaactatgactcggccatgcatccgtatcatagggagaaggctcacccagataatcgaatcctgtccaaacgaattggccgatagtccagtcataatcatccgctaaagcaaaatcttcatcgggtacattggaccaggagcaatgttccaagtcatatccggaagactgatgatcatcgtacttcgcatccccgcgtttctctacaggaaatttatatacgccacgagaactaacggtagaggatgtttcagaaccaagtactatattctgcggcaacagttcataagcttccagataacggtgtgcgcgataattaaaaccgggcacatcaatcatggcggcaaaaccattagcaagaacacaagtcacctgatccatgccgcaagtaacaggacgtgtcggatcttcacgatgacagatatcctgcaagaaagaagcgactttatagcctacgggactacattgggtaggaacttcattaccgatactccacattacgacacaaggattgttgcggaactgatgcaacatatttatcatatcacgttctgcccactcgttgaaataacggtgatagccattctcacatttggcaatgtcccattcgtcgaaaggttccagcatcatcataaagcccatttcatcacaaagttgcactaactccggcgccggcatattgtgagcggtgcggatggcatcacaacccatatctttcagcatcgtaagttgacggcgcaatgcagcaacattgatggcagcgcctaacggaccaagatcgtggtgattgcataccccctggaacttgcgatgcttaccgttcaggaaaaaccctttgtcggcaatgatttctatgctgcggataccgaaacgagtagtgtattcatccgtttgcttgccatcggcatagattttggaaacagctttatataaataaggtgtctccggcgaccacaagcaaggagcattcaccaggaagttttgttcaaaaggctgaccatgattaatcttacgggtattatccttcgttgcaacgactttcccatcgggagagattatctctgtcacgatacggatatctctttcttcatcattggcaatagtggtcaacagacgtactgaagcatactcatcagaaacatgaggagtagtcagctgagtgccccatacaggaacatgtactttatcggtactcactacacgcacattgcgataaagtcctgcgccaggataccaacgggaagattgtggtttattttccaaacgcacggcaagcgtattgtttttaccgtctttattcaaaagtccggtgacatcacaatggaaagaattataaccaaatggccagaagcatgcttcttgtccattgacatacacacgggcttcgctcatggcaccatcaaagacaagtgtcgtctgctgattgacgggggcatcgaacgtagtacgataccatccgatgccaacataaggaagtccaccggtacgtccggttttgacggaagctttcttctcgaagttctgcgttaccgccacttcctgcaaatcgttgctgcgatcgaagggaccgaagatggcccagtcgtgaggcacggttacgatttcccacttccggtcgtcaaattccggcttcatggcttccggagcttcccccttcatgaacttccagttcttttcgagtagatactcgctgcgctgagccattaccatcaatgaaaggagggcacagcacgaaaatgccaacacgttctttctcatttgtcttttgctgtttttattgataaacgattattattatttgaatgcatccattattacagtagggtaaccatcttcggtaaatgcacccaaccgatactgacttggcttacactcgggttcccagtaaaacacacctttgcagcgtccatccgtgttatcgcggcattcttccagaatgcggctcagtagtgctttcccttcggcaagaacggcatcaccggccagcttaccattatcgtcggcacactccatgcctgtttctacgatcatcacatcacaatcgtatttctcgcttactttcttgatgttggctatgcaatccgtaatggttttctcagcagaggtttctttcccgctgttcaaagcccagtagggatagagtgacatgcctatcatgtcccatttggcaccattatttttcaggatgtccaagttccagttgtagagttcgttatcgaaaccattatccaaatgcactatcacaatggattggggaaaaaccgctttcacggcttcataaccggcagcaaacagttcggcatattgcttcggattccggtcggcttgccccatatcccataagaatccgttgctggtttcattgcccacttgcacccattcgggggtgatgcccttgtctttcagagcgttcagcacgtctttggtatggtcggcaatcgctactttcgtttcattgagcgagagtcctacccatgcagcggggatgttctgcttacccggatcggcccatacatcactgtaatggaaatcaatcatcagcctcatgcccagctgatgggcacgccaggctttcgccacaacatcgctcttattgcaccagccgtccgaggggttcacccatacacgcaaacggatagagttcatacccaagtcacgcatcaaagtcatacattccgtttgccggcctgaagcatcataaaacttagctccggaggcttccatttgcgtcaaccaactgatatcggcacctttggcaaatccggtcatatcataagtaggctcttggggaaattccggagttttatcatcattactacaagcggctgctcccagaaggagcaagccggctattaatatattcatatatttcataatttagttcttttattcaatggtataggttgcatttattaaatctacagtcagggtgtatgtgcccggtgccagcgtggcgtcatccgtaatgccgtcagcacccttataataaagtttcccggcacttccgccataaacgtaatcccagtttccgtcaaaaaggtaaatcttaaatccccaggcagacggttgtgtgatagtaatgctactactaaacacgccactggtgcttgtagcaggcaatggctcgaaagtccaatcttcatcttccagtttattaagacctgcgatatagatctctctgcctaaagcccttgaattataagtcaatgccttcaaagatacatcaaagaaataaagaccaccatcaggagccggaatattgacggccccgtctccaacctcgaatgccaatataccggcgtccgcatcaccctcatccaaagtatagaccgcactccagttcccatcttcaattcctatctgatatccccagggagcgttcacatctgctacccccgcatatcccagattattttcattataaagacgcaagtggtggttgaagttccaaccgccttccccttcactgatgcccagcatatagagagtctcacgcgccggttccggctccggttccggttctgcactaccgctgcttacttccactgtccattgcttcgaattgctcaagtcaatcgtcaaggtacattctcccgcagcaggaacgtttacagtgatattgtctgcctgagcgccaaaggtaagagtttctccactttgcccaaagcctaccggagtattttttgcagcagcatcatccgttccggtagaagagtcatacagtttacctgttccggaaatctgcaaagtgatatttccagcttgtacggcattgaaagcataagtccatttcgtgttcggacgatcgaaagtcatctctccggacaaatctcccgcaagagtaagagaggggatgtaaagagcagaccataatttagtattgacattcacgtccacatagtagcaaccgcctattcccggagaccagcagttccaacgcttttcgtcatcgtcttctgaggacaacacgaaagcggttcccgtcacaccgtcattaccccaaaccgctccgttgccttctttcagatagaagttataccaaggagtaagccccataaatcctttatagtcaccgtcggaagcatctgaataaagcaccacgccggtttcttccttatcggtattgagaatataccccatacccatatcaatggtgtaaggggtaacagataccttcactatattggaatacacaggtatcatattgttccccgtccgggcagcaagacggaaatagacattgtttgccacatcgggagtagcacctatgctcttggccaacgcattgagtgccgctccggtataagcctttgaaagagaattctcggaactttcattcaccacacccgagaagtcctcagtagtggaaacttgcaaggtttggatagtcacatcaatagccgacaggccgggatcacttatctgtaaagcatctttagtccatgccaacgacaacacaatgtccttactgttttcttgcaacaggacaacattgctctccgtggcaaccagttctcccgcttcaaggctgctcaagtatatcttatcttcatccttttcgcaagcggcaaagcctaatgtcagtgcgagaaggagaatgaaattcttcattgtcttcatataaagtgtattaaattaatagttttcgttataaagattcggattagccgtcaattcggtagacggaataggataaatgttgaatttatcgtccacagcctgccccgtaatcgtaccgcccttccattgccacagataggaggcagtggtgaacttaccgtagcgtatcaggtccgtacgacgtacacactccatgtagagttcacgtgcccgctcatccaaaatgaagtcggccgtcatttgtccatcagtaatattgcctgaatcattaccaaaggcacgcatacgtagtgcgttgacataacttaaagctgtggtacggctactaccttcgccacctctcaccacagcctcggccagcattaggtagacatctgccagacggaaaacagggaaatcggtactggcgctaccgtcattgctgggggaaccagcttcgccggcatcagtcagattggtccacttctcggacagataaccattgctctggctctccactacatcaaccgactgggtttgaccttcggtataaaacatagcgcggctatcattcgcatcaaaaagattaggaaactcgcctcgcaggcggaagcttccccagccggacggcactccatagtcggtgggcaactgtgtatcagaagtgttatttatactaccacaaatgatataggtagtcgcaccccacgtcatggtgcgttcagaatccaccgggaaagcatagatgatttcgttcgtgcgcaagtggttgtcagcattgaacaacagggcatagtcgtcttccagcgtatagcccgccgtcaaaattcggttgcagtaggtgatacagtccgtccagcgggcggtaccggtataaatctcagcattgaggtagaggcgtgccagcaaggcgtgagcagctgagcgggaagcacgaccgtactcgcaggccgtgcggtccagcaggtcgtcatcaatcgctttcagttctgactccagattatcgaataactgctttccggtatagcgcggcggcaaataattacccacagggtctccctctgtgacgaagggcacgttgcggaagaggtcgagagcatgagtataggccagggcgcggatgaagcgggcttcggcacgataatgacgaatctcctcctgctcgctctcgctgaaggcgctgatttgtccgtcagtggcgttacgcaggaattcgttgcacagtgctatggtgtagtagatacggtagtacgtatcagatacccacacatcgttggcatcccagctcaggtaggtgagaccactcatcttgtcgccctcctgccaggtgtataccagttcgtccgtaccacactcttgcatattgaagtagcaacgcaggtaatcgtagccggagttactactcatgtcggagttgccgccacccttctcctgtccggaaataacaaaggaaacataaagtttacccaagacggctttgtagttggcggccgacgtatagacatctgccgatgtggtttcaatgtgcggatactggttgagatcgcctacgcaagaagtagtaaggaatgtaccggcaaacagcagcgcggcgtaatataatatctttttcatatcttgttctttattgatgttgacgaattagaattcaaatcccagactgagcgagtaagtacgcggacggggatagaaggaggagtccataccattcgacacttcagggtcgacgcccgaatagcgggtgatgcagaagacgttctgtaccataacactggcgttgaggctgagccaacggcacaggcgcccgaaattataggacagcgaaagattgtccattttcagaaatgagccattctccacgtagtagtccgacagatgttggcggctttggaagttggtcttcaaataactgctgtgcagattattcagttgataggaattatagctcattgttccccaagcaccggtattcatcgccattccgttatacatgtagtttcccacattggcacgcaggctggtgctgaatgtccacttcttgtagtttagtgaggtactgaaaccaaaaataaaatcaggcgtaggtgacttgtaacgatagagatcgccggagtttatctcgccatcaccgttcaagtcagcatatgcaccctcaatgggacgaccggtttcagagtcgtagagttgcttgtatacatagaacatgtagggttcgtaaccttcactcaacacctggacaatctgtccgtcaatggaggcacctgcggatatgttggtagtggcaccaccttctaccagtgagaggttcttgactttcatcttctgccaagtcatgttgaagctgacatcccagttccagttcttactttggatgggggtgacattcaaggtaacttcaataccctggctgtccacattgcctacgttggttaaaatgttcttatcgaaattaacgccggcaggagaggcgacggtggccagcaaatccttggtttggcgggtataatagtcaaaactaccggtaatacggtccttcagcagcccgaaatcaaatccgacattccaggcagtggtggtttcccacttcaggcctgagacgtaggcctcgggacggtaggtagtggtgtactggttaccaaacagtgcctcggctccggtttggctggcggtatagacaggcaggtaattgtagttgccaataccgtcctgctgaccagtgactccgtagctggccctcaatttcaggttgctaagcactggattatctttcagaaaagcctcctcgctgactctccatgccaaagctacagaggggaaagtaccccatcggttatcagaattgaagcgagaagtaccatcacggcgcatagtagccgtcagcatatagcgggagtcgaatgtgtagttcagacgagcataatatgacaagagtacgtggcgctggtcagtggcagcagtagtactctgcggctcggccagaatgttcagttcgctgtattgaggagatgtgctcttccagtgctgatagtcgtaacccactgtggcgtcaatactgctcttccaagcgtcaatgtatttattgtagtttagataagtggtgagcagtcggttagtgttcttctgcggaccgtacttatagtcacggcctgaagtggtttggtattgggcggcttcagcaggaacatatatcctgccctgccctttggcatagtcgtatcccaaagtggcgtggaacttcagttcgggcagaaaatgcatcttgtaatctacatcgaagttgcccaccaggcgagacacccggctggtggatttatattgctcgagtgctcccagcggattgagggtacctccagtgactatctgtcctgcattgtcgagggcttcattataaccgccgaaagtgtcgttacctgagtaaacgggtatggttggattccatgtggtcgcattccagatcacgtcagacttggcaaaacgattattgttgcgcgaggctttgacgttaagattcaacttcaaatattcatcgaagaaagagggtgacaaggagaggcttcccgtgagacgttcggcattgtcggtcttcagcaatccgtcctgattgtagtagcccagggaaacacggatgggaaagttgcgagtgatgcgaccagagacactaaggttgttgtcggtaccgaaggcggtatggaaaatctgatcattccaatcagtgtcggcggtacccagcaaagacttctgcgcatcggtaccctgtgtattgacaaggttaatgaactcctcgcgcgaaagcatatcagtcatttttgtacgggtttgtattgaattggtagtagtaagacttacctttatacgatctgtagtgcctttcttggtagtaatgattatgacaccgtttgatgcacgcgaaccgtaaatagcggtggacgaagcatctttcaggatagtcatactttctatatcactcggattaatcagtgccagaaagttaccgtcattgccactgatacctcctgtttcgaggggtacaccgtcgaggacgataagcggatcgttcgaggcgttcagcgaagcaccgccacggatacggatggtacttccggctgtgggtgagccactattgctcataatctgtacaccggatactttaccgttaataagttgttcaggcgaggaaatcagtccggaattaaaatccttactactgacattggaaacagaaccggtaaggtcgctcttgcgttgcgtaccgtaaccaatgacaacaacgtcactcaacatctgtgcatcgcttttcattttcacatttacagtgttaccgcttggcacaggtacagttacagtttcatagcctacataagatatttgtaaggcggtagctcccgaaggaacaatgatgttgaagtttccatcaaggtcggtgattacacccgtactggtacctactaccaggatactggcaccgattagtggttcgttcgtgtcgtctacaacatgcccggttattttctttccctcttgtgcgaaggccgggctgacagttcctaacaatgcgatacacagcaggcaaaagaacgctgtgacgcgaaaacttaagattttgtttctcatacgtggtatttgttttaaagtgttacataatcaaatctaaagagatgtgtcatctgcggatgaaagattgtagttattttattcaagccagatactccctatctctatttccgcagtcttttcagcaactccgtcaaaggagagttcaagagtttcaatcccctctaccctgaaaggtatttcagtttgcggacggaaataatgatcaaggaagaccggataggcgtggggaagcaaagcggtattcgtttgttttaaatcctgcaagggtacacgaatgataccatcagtcgcagcggcacacgaagcaagataggtatatccgtcagaagtaatgaagccggcttttagtccttcgggaatcttctttgcatggatacacaaagtatggcaggaagcgagtcgctcagggcgtccgtttatatcgtccttaatatagcaacgaagaacaaagacgggtgccttatctttagactcgaaggtgatgcgcagggtaggcttctctgtcggtgcattttgtattaatcgccggttcgtacggctccattcgggcatagtatatgtttccaacttactgtcagcatccactatttccagcagaggcagtgatttttcaggagcaactacgttggtttcccacagggtagccgaagtatagtcccaatccagtggacttctggctactcccgaaggaaacgtttgtcgcttatcgccttgacaaacgacgatgttatacctaaaacaaccctcttttatctctgtagcaggtatggtagcacgataagtgtaaccgcctgcatgattcattttcagataaggattcttttcattccagaaagatatcttatctgtgtagataataacggaatcgggcatttcattacccgccacaatggcctctatccgtaaatctttaccggcatctactgccttggcaggagaatgagtaacagtaaaacctttattatctgaaatggatggacatacatattcaccaagagtaatattctgccaatgagcatcagcagtccatttaccggaagcagatataccttcacgctgtaacagataaacacccggacggagggtagaaatcttaccattcgcagcttgtgtactgaatgtatttccattattcaagccgttcacccggaattgcttacctaaatcaggtaaattcagagtcatatcccatgcaccggaaacaatgcgcattacttctttatccaaagaaggctttgtaaacggatcactaacctgtacggcatcgggcattacttccaaacgccaaacaccctcttccaaacgatccagccaataaactcccgtaccttcataattcaccaccggagatttgccacaacctgcaattgcgcgaagctgagaaatatctttcggacgggtttgagttgtattggaatagtagaatttctctccgtcattcagttcgcttaaatcctgcacgtagctgacgcggaaatcattgaataatgtatctgccggataattgccaaaactctctcctctgcccactttctgcgccgcttctgcggcaatcatcaatccgatagccttattcggggtgtatgctacattcaggtaatgagtctggtattcagtattgtaggccgccatgtcgataggatcataggcaaactgagtaatccactggaaaccggctgtgcggaaagtgcgtacagtggccggatacatataggaataaagaatatcagcgggatcgaattcataaaccatacgggccttcttatcgaaacctttcagattagagaaaggaatatcataacggtcaacgaaaggcaagaagttccccttgcgggtatgtccggatacaagcccaatgggataccattgataggtagtaccttgtatagctgtagaatagtaagcctctaccacatgctggttatggctgacattgtagaacaccggtttgcggttgcctgcacgtttcagggcggacagcatcttatttatgtaattacgcgtttcgactacagtgccgggatggcaaggctcgttgtttatttcaaagcctacgatataaggatcgtctttgtaagcataacctgtataaggattcacgtggcgtacaagagcagcaatatacttttcctgtgcagcaatagcttcagcatcgctatgaacggcacatttatcataatgggatgaaaagccaccgatgggttggttgcgctccggataaccgttgccaaaatcagtctgtgccgtgataacggtacggataccacgttcctgtaatttatggataaggtagtccaataattccaggtgttcattttccagcaagttaccttctgcatcggaaatctctacgtcccagatgtgaatacggtaagcattcagtcccaaacgtgccatgtgatagacatcacggtcgatagcagttttacggtccactcccagatagcccatcgcccgataggcatgtgcaaagggtaaggtgtagttcacaccaaagaaagaagcttctttcttcgtatccgaccaacgcatgacgccgccggcatctacataaatagtaggaatgcttttttgtactttgttctgtgccggagcaactactgccagcaaacaaataatcaagataagaatgtgtctctgcatgtcatcaaattcaagttggtttttcttgacggcaaaagtaatggagggctattatttgtcaaagcagatatcggacataaaacaacacaaaaaggacatgcattgattatcagtgatatccataggcaaatactggattagaatataataacaaccaggaacaattaatcgaacgaactggtattttttctccagattcttgtaattattaggcataaagaagtatctttggcgcattctttatacaagagattaaatgagaagacacaccaacatactaattttactgctcctcacaggactctgcatttctgcaggggcgcaaaataatccctataagatagacgactcattatatcccatcttccaacgtgccatcaaatggcgtactcagccccaaggactacttattgctgatacgctttatgcggaagccacgcaaaagaaagacaagaaagcacaatgcctggcgttaacaatccctgtcagcttttatctgagtaccaataattatgagaaactggaacaagcagcaacccgagctaaagaagaagcaagaaaaaataattatctccaatattattattctgcctgtaccaacgaaataaactgcctattgaataacggacattcattacgagccctgcaaaaagctgaagaaatgaaaatacaggctttcaaagatcagcacgagtatgggatattttcgtgtatcttcactttagggaacatttactacatgcgtcaaaacagagaggtagccacagagtactacaaaaatgcgttggaatatatgctaaagaacctacccgatcaggacccgacatatatgtatataaacctttctgaatattatcgggataaaggcgaaggtgaagtggctttggaatatgcagagaaagctgctaaagccgctaaaaccaatgaaagtcgtgtagcctccctgctaaataaatgcgaagtattgtattccatgaagcgtattaatgattttaatgcttgttatgatgaatgcacgcaggtaatagaacaatatggtgtcattcgcaagacagccgtacaacgtctgcatatctataaactcattctaaataaaaattacgatcaggcacatactgaagcggattccctacgcaatttattgtcaacctaccagatgcaccatgaaatatatctgaaatcaggaaactatgaaaaagcttatatctataataactggctccacaattatcaggattctgtcaaccgccaggtacagtcatcagacatcgccgaactgaatgcacgtataggtactgaacgcataaaattggacgccaaagccctggaatatcagaatacagcactcaacctgaagaatacccagctggaactggaccggacaaagtcgcagtctgaactggaaatgatgaatatcgagaatagtaagttagtactggaaaaccggaatctggatctggcacgcctcaatgtagaagcggaaaagcaaaaagccattttaaaagagcaacaaagcgcctcccaacattacatcgtaaccctcagtcttgtgctctcattcttgtttcttttcacctgcttcctgatattctacctgtacagacgccgtaaaacaatgactatccttcaggagaaaaatgaagaactcaccgttgcgcgtgaccatgccgaggagtcggaccggatgaaaagcttctttatacaaaacatgagtcacgaaattcgcacaccgctcaatgccatagtcggattctcgcaggttttatctactccggacatggaagttgacgacgaagaaaaggaagagttcagcatgctcatccagcagaattccgagttgctgactacactgatcaatgatgtccttgaccttgccagtctggaaagtggtaaatacagaatgcatttggcgccccaccgttgcaatgaattatgccaggtagcaatggtttccgttgtgcatcgtaatccgaaaaaagtgaagtcttatttcacttccgatgtgccgaatgacttcctgtttgtaacggataaagaacgcttgcaacaggtacttatcaatttcctgaccaatgcggagaaacacacggaacagggtgagattcaccttcattgctctcttacggagaatccgggaaagataaccttctccgttgcagataccggtccggggattccggcagaccaggcagattgcgttttcgaccggttcagcaagctggatgaattcaaacagggcacaggactcggattgaacatctgttccatcattgccggacgcctgaaaggggaagtgaaactggataagaattataccggaggagcacgtttcctgtttatacttccgctcgacagtgtgcctgataaataaagttctgctaaacaaaactcaccactcgttgttcttttcgaaacgataacaatctaatgaaggaacaatgaaaaagttgacgtattctttcttgcttctgatgctcctgacatcagttccggccctggccgattatgcgcctgtcaatgtgcagacagcactgaaaaagatgtatcctgccgccaaggatgttgcctggtcacgggatgagacttactatgtagcggactttatacagaatggtttcgacacaaaggtctggttcaactccgaagcgcaatgggaaatgaggcagattgactgggaaacaatggatgaagtgcccaatgccgtgtacaatgcttttgctgcaagcgaatattccgatggaatggtgcagggagtcaccttagttcagtttcccaaacgggaagcggtggtttctgtaattgtgggaatggcgaatacacagaccaggtaccaactactgttcaccctcgacggtggactggaggatgaacgcaatgcaacctatttcaataacctgcttggcgcggaagtcttcttataaaagccccctcagacatactgcttcggcgtcaccccaaactctgcctggaagcatttagagaaataggaatgattggagaaaccgaccatatacatcacttcagccacagtaaacttctgctgtttcagcagcatagccgcctttttcatgcggatggacttaatgtattccacaggtgtcatacccgtcagttgctttatcttgcgatacatctgcttgttattaatatcggtccattcacaaagggcattcacattcagttcggagtccgagatatgttcttcaatcagatgaatcacgcttgccagaaacttctcatcataagaaaccgcctctatctccttcggagtggaaagaacttccatacgggctttcgcctcatgcgtctcccggctatgtaataactgctccacgcgcgaaagtaaaatatccggttcaaagggtttaggaatgaaagcatctatatgcaactggatactttcaagctctgtttccttatcacttttcgccgtcagcaagataatgggaatagtggatgtgggaatattcttcttgatatgacgcaccatttcaagtccatccattacgggcatcatgacatcagctataatcagatcgggcattaattccatagtgagttccatacctatcttaccattatccgctaaacggcaacgatatttggtatgcaatatctgatagataaactctgaaacctccggagtatcatccacaatcagaagcaatggggcatccgaagcaggcatacctgtatctggaaccacaacttcaactccggcagcgacaggttcgatatcagaagaaacagtttccggagaaacctctacggcagagtgttccatagcaatcaccggaagggtcagcgtaatggtagtacctttattctcttctgaagaaagttgaacattaccaccatgcaattccgtataagtctttaccaaatataatccgatacccgttccctcctttttgcctgcggtcttgggagactggaaaaaacgctggaaaacatacggctgatcctgccgggaaacacctatacctgtatcggatacagagatatgcacctctttatcagaagcctgtaaacgaagtgttacctcaccctcttccggagtgtacttcacggcattggacaagaggttatccaagatagattccagttttatggcatccatctgtatgtatatcttttcacggtcggtatgaaaatgaaaagttagtttcttctctttcgccttctcctctgcatacaaagcaaataagccacgcacaaaagataccagttcgatttgagaaagtatcaacaacgtattgttgccactatccacccggttgaagtctaatccctgatgaatgagtgaattcagcttcatggcatttcgatgcacctgctccagttgtttcttctcctgctgatccttgataccgggcagcaacttgctgataggggcgataatcatgctcaacggagtttttaggtcgtgggaaaggttggtaaagaactccattttcgcctgcgattgttccaaaattttctccttctccatacgctccagcttcaagcgattcttaacgcggaagaagttgatgatccagaccaccagtaccagacagagcaagacatagagcgccttggcccacggagtatagtaccaggggggaatgatatgaacctccagtgtataagcccggtccgatggttttccataagcgtccaacttactcaccaatagacgatagtctccataactcaggttattgtaagtgatacggttcgtattcgctttcagcaagttccactcacgatccacaccttccagacgatatacaagtttgcttttttcttcaagagaataaggcaggtcggaaagttcaaaggcaaggttattttggtcataagccagttctatccgttgcgagtagcggatactttgttcgggcaatgaggaagtgccggagcgtccggtaccaaaatgtgaaacatcagtttgtgaggcattgggctgatacagttggttgttgatataaatggcagtcaggataagcggcttttcggtgtgttcagccagcagagcttccggtgaagatatggcaaagccatctgccgtacccaagtaaaattctccgcttgtccggtcgaggaacatactggtgaaacgtttatcagtgatattcagccgacggatttccagcgtttgctggtctgccacccagaaaccgtcggtagtagatatccagatttttccgtcagcctcagccatggaaagtattgcatagtgattgtactcatcgaaaggaagcatgcggatactattgttatcaggctgtacacgcatcacaccaccgggaaagcctatccagatatgaccgtcttgggcagagaggatgaagttgggggttctttcgcctgtcagctcgtccggggcgatatgggttatctcgcctgtgcggggatttatcttctcgatgctgttggcgctgttgtacagcaatgcccatacattcccttcacggtcggggattagctggttgatgaacatgcccgaaagaccgttgtgtatggaatacgtcttctctgccatatagggaccaccggaagaacgcattaggttctgtttgtctaccacaaaaattccaccgagacaagtggctatccagagtctcccttcccggtcttcaaataaatgatacgcccagttggcattgtagcggcgggtactgtccacaatgctataatagacgaactggcggttcttcggatcataacggctgatgcttccatcggtagccacccagagttgctgctcccggtcttcataaagatggcgtacccggttgtgcgacaagggatatttccgatcacccattttataccaggccacatcttgttcttcacccaggggttgggtgaaacgaattagtccgttggttccgccaaaccagtaggttccgtgtgtatcgcgaagcatggaatagaactggttcccctctcccgttccggtgatttgtgaaatggggatataacgcaacgcattgttattccgtgacatggaaactccgtaatccgtgcccagccagatgttatgttcccggtcggcaaagatggtccagatgatattattggagagtgattgcagatttcgtgagtcgtggaccacgtgcagcaaagattcttcttcctgatatacatacaaaccgttgtccgtacccaccagtaactgcccactgccatccagtgccaacgacttgacggaattatcatggaaagcatcaatcctctgagtacggccgtcagcaggcgtatatctgaaaagacacccttccgtaccgatccagatgcagccacgtgccgtatcttccagtagggaattgacaaactgattactccggttgccactgagaggcaggtctatttcttcaaaatgccgggtagcggggatatagcggcagaagccgttataggtaccgatataaagaagcccgtccgaagagcggatcagggaatagatggtctggtgtggaataccttcggtaacggcagagagttggtggtcgttcagcgaataggtatagaggccgttcaatgttcctaaccacagcataccgtcgtgtacaagtaatgcacggatatcggtcggaagctgcgtttccggttcttcgtagatatctgtgcgatagttataaatcagcagaccattgtcggcacccagataaagataggtactgtctaccaccgtaccgcaataaatctgtgtattgttacgcttggcgaaagtgaaatgtggctgcgtggaataaccgtcatagctgaacaaccctttattggaaccgatccatatcagtccctgtgtatcttgcaggaagcaattgattacagaggcttctgtccccagactgatattatcgaacaagcgataatccggtttctgtccggacagcttaacgggaagcgttatctgcaaaagtataagtagaagaagaaaaacaggtctgcgcatacacttcggtttgttaaaggtcggggacaaagataaaattaatctattacaaataccctgcacctttctgaaaaatcgcctaaaaccactggcttacaaaattcataatggtggggaaataaagcgaaagccccatagcctacgaagaaaattcattggctacagggcggtatcgcatactttataaaaattctacaaagtttcaatctctcccgatgtcagccctgtagactttactatcacgtcaacaggaatacccagttgcttcatgttgcgggctatggaaaaacgttcttcatctcgtccttccgcacgtccttctgcacgtccttctgcacgtccttctgcacgtccttcaatctttccctccagtttggcagaatccagcacatcgttctgaatcatcacggcgctcagatgctcgtcataagccatacgctctttagggggcatggagaagtatttcagtttctcgcgagcctcgctcagaccgggagcggtggtatcgggacgaatggtaccgtccttcaaatatttcatccattcttcaagtggtgtgacagccactttgtcgaactcattcacacggataaggacatattcgggaaatatctcggccggcatgcgggagacaatggcatcacgctccttgacattcacctgaaggtggtcgcccgtatggacgcctacgaaatggttctgaccgtaatacaggtagtcgtttccctttccgatatcgaagtagagaacgctgatggagtagattttcttcaccttatagtacgtttcacccagcgagatatgctcagtgatagccttggcaacgccataaagaatccgctccagataataaagttcgcgggtattctgtatctcgataatgatgatctcgtccttactgttacgggccttgatgtccacacggttgaatttatcttcagcggacagttgattgctttcactctccagaatttccaaaatagtgactttctcacccagaaacacggtgaggaaaccttcaagcacgtcgaagtttgccttctggcgtaacaggcgcttgatggcccagtcgaaacgtacatatttgtcttgaagttcttccatttctctaattattaatttggaatacataactttacccacaaaggtacatcttcttgcggaaaagggcaacaaacatacgaaagaaagtgaaagggacaggataaaaagagacgccggttggcattccttgcaaagtcagcttcagtgcggctgtcaggtattggcacgaaataagaaggtacaaggatattacgggctctacgaagtttagccaatccgctttccggcaatatcgttgtggtcgccagcatgatggcaatcacaaaagccgaagcacttgttaaaaattcatatattgataacatctttccctgcctgttcaataccggcataaagacaatgggactttctgtaacgtttgcaaacgtttgcgcaaatcactaacccgataactgtcaatgaagaagcgatatttcatgtattcagctatttttgcaaccggataagtcagttcaataagataagctgcacctcagcaataaaaaaacaagcaagcttattttgtattgtttttggtttgcactacctttggataaaggaatacttagagaataccatgaataaaccgcagattaccatcaaggacatagcacgggcgttgaacgtctcgccctctaccgtgtcaagagcgttgaaggacaacccggatatcagccaggaaacccgcaaccttatacatgcttacgcccgcgagcataattataagcctaacgtacttgcagtaaatcttcgagccagccgttcgaatacaatcggtgtaattgtgccgcaactggtacatcactttttctcgtgcgtgctgagtggcattgaaaaggctgccgccgaagcaggatacaatattctggtagcgcagagcaacgaatcttatgaacaggaagtgaaaatcgtacattcattccttgccgcccgcgtctgtggtgtgattgcctcattagcaaaagatacttcccaatacgaccattatcaggacttgctgaataacaatattcccattgtgttctacgaccgcatctgcaccggattgaaaacagagcgggtggtagtggacgactatgccggttcttttgctgctgtagagtatatgatacagacaggctgcaagcgtatcctgttttatggagcagccccgcatttggaaatcaccaagaaccgccggaatggctatctggatgccatgaagaaatacaagattcccgtagacgacagcatgattatgttgtgtgatacccgggaacgtgccatatccatcacccctgacatactggaaggttccgagcatcccgacggtttcttcgccatcaatgacgaaacagcttcaggcattctgtatgcctgcaaactggttggaaagaaagtgcccgacgaagtatcgatctgcggatttaccgacggtgccatcgcccaaagcacagatcccaaactgaccaccgtagaacagcatggagaagaagtcggaaaaagcgctttcagcattctgacaggtaaactggaagggggcgatgataagagtagcaacaagattgtgagaacgaatcttgtagtgaggggaacaacgaaataactgaataaatatctaatacataaaattaagaatgaaagtaaaacctgatttgagcttttggaagctgtggaatatcagcttcggcttctttggcgtacagattgcgtatgctttgcagagtgcgaacatcagccgtatttttgcgacattgggtgcagacccgcacaatttgagttatttctggatattgccaccattggcaggtatcatcgtgcagcccatcgtaggtgctgcaagcgacaaaacgtggacacgcttcggacgacgtattccttacctctttgtcggtttactggtagccgtactggtaatgtgcctgctgccgaatgccggtagcttcggtatggcagtcagcacggcaatgatattcggattagtatcgttgatgtttctggatacatccatcaatatggcgatgcagccattcaaaatgatggtgggcgacatggtaaacgaaaagcaaaaaggccttgcctactctatccagagtttcctgtgcaatgccggtagcttggtaggtttcctgttcccgttcatctttacatggataggcatcagcaacatagctccccaaggtgtagttcccgactcagttatatattccttctatatcggagcagccattctgatactttgcgtcatctacaccacagtaaaggtgaaagaaatgccacctgccgaatatgcggaataccatggcatcaccgaagaggaaaaaaaggaaaagatcaatatggtgaaactactggtgaaagcaccgaaagctttctggacagtaggtttggtccagttcttctgttggtttgccttcatgttcatgtggacctataccaatggtagtgtagctgccaatgtattcgatgctcccaccgttgaaacagtggtgaacggtgcaagcaaaatagtgctggacactaagagtatccaatatcagaatgctgccgactgggtaggcgtattgtttgccgtacaggccatcggttctgtactctgggctgtatgtatcccgatgttcaagaaccgcaaactgatctactcactcagtcttgttttgggtggaataggtttcatctccacgtatttcgttcacaatcaatatgtattgttcatctccttcctgcttatcggttgcgcatgggcagctatgctggcattgcctttcaccatcctgaccaatgctctaagcggcggacacatgggcacctacttgggactgttcaacggaacgatctgtattccgcagattgtagctgctacgctgggtggtagtattctggctcttttcaccccgaaaggcatgttaccgcctgaaataaatatgcttgtcatggcaggcgtgatgttgattatcggtgccgtttgtgtatatttaatcaaagagaccaaaggagaacaagcaaaagcataatccgtgcgaaaacaaacttaaaaggggatgtctatccctctataacgaacaactctcttctctacgataatcgccccgttcctttaaaaagatcggggcgattcttataaaggaaccaaacacatcttattctttagacattccttgtcttctttttttcctcatcattgccgtttatccgtttatttgtttatctttaccgccataatcaccattgagatacacaccatgaaaagataccttaaaaccgatgaatggaatattattgaagataactttcacgccgacaacctgcgaatgtcagaaagtatattcagccttgggaacggtcgcttcggccagcggggcaatttcgaggaaccttattcaagcgactcataccgtggttcattcgttgccggtatcacttttcttgataaaacgcgtgtaggctggtggaaaaacggtttccctcatttctatacccgtattcccaatgcagctgactggagtcgtgtcagcctgcgtctcatcgacgaagaactggacctggcacaatgggacgtgaacagcttcagccgcaggctcgatatgaaagcgggtatctcctaccgggacttcgaaatcacatctcccaaaggacaccaaatacgggtacatgtggagcatatcaacaatatggctcaccccgatttatgtctgataaaatacagcgtcacctccatcaattatacgggaagaatatcactgattccttccctggatgcagtcatagtcaataaggacgatgatccgaacgagaagatatggaatatcctccgttctggtgtcacaaaggattgtgcttacctatggacgcaaacccggcgggaagatgcgcaagtgtgctatgccatgacctatcagttcttcaagaacggcaaagaagccacctcgaacccgatacgcattgaaaaggagaaacaaaccgggttcagcatcggggcagatgtgaaaccgggagacaatgtaatgctcatcaaatataccgttataagttcgtcgctctatgatgaacgtcaggaactgatagaacattccgtcaccaaagcccgtcagactaaaatagacggctgggataagctggaaaacgatcatcagcaagcctgggccaatatatggaaagaaatggatgtggttatcgaaggcgatccggaagcacaacagggtatccggtacaacatctttcaactatgccaaacgtaccgcggtgacgatccgcgcctgaatatcggcccgaaaggcttcacaggtgaaaaatacggtggaaacacatattggaatacggaactttgttgtgtaccgttcttcctactctctactccgagggagattgtaaaaaacctgttgatataccgttataaccaactgccgaaagcgatagagaatgcccgcaaactgggtttcaaagagggtgccgccctcttcccgcaagttacttacagcggtgaggaatgccacagtgaatgggaaattacctttgaagaaatacatcgcaataatatcatcgtctatgccattgcacagcatgctgcaatcacgggtagcaaagattatgtagccaaatacggactggaagtaatgatcgccgtctcccgtttctggagccagcgtgtatctttctccaaaccaaaacagaaatatgtgatactgggtgtcaccggaccggatgagtacgagaacaacgtagataataactggtacaccaattactcgtgtgtgcagtgcctgcggatgacacttaactatcttgaaattattgccggagaataccccgacgaatatgcgcgtgtacgccgtgtcaccaacctccgccaacaagaagaggctgaacgctggcgcgacatcatcaaccgtatgtatctgccggaagataaagaactggggatctttgtacaaaatgacggtttcctggataaggaactgaacagtaccgatgccattccacccgaagaacgccccatcaatcagcactggtcgtgggatcgtattcttcgttcatgctacatcaaacaaagcgatgtattgttgggcctatatctgtattatttcaatttcgataaggaaactgtccgccgtaacttcgatttctatgaaacaatgacggtgcatgaatcttcactttccccgcacatccactccattcttgccgcccgcatcggcgaagtggaaaaggcttaccaactctttctgcatgccacccgtctcgacctggatgattacaacaacgaaactcaccaaggactgcatatcaccagtatgccgggcagctggcttgccattgtacgaggctttgccgggatgcagattctggagggcatactctctttcttcccagtcattccagagaagtggaacagttactccttccagataaattatcagggacgtacacttcatatgcatgtaagcaaagaaataaatatttcacttattgccggagaagaactgaacatacaagtatataaaaacgtttataagctcaaattgggcaccgatttgttgctcaggatagaggagtagaagccttatcattaacaacgcgtaacaaaataaaccgggagaacaattatctgtttttccggttttatgttttttatacctaaacgaacaactatatattagtatgaagaaaatctatttgttcgccatcagcgtgatgctgcttgccacatcatgcgggcacaagaaagagggcgatgccacgctggtccgacctgtcaagacagctactgccagctcccaatcggtcatccggaaagacttctccggtattgtagaagccgtagaatacgtgaaactggccttccgtgtcagcggacaggtcataaatcttcctgtggtagaaggccagcgagtaaagaaaggacagttgatcgccgccattgatccgcgcgacatttccctgcaatatgccgccgacaaagccgcttacgaaactgccgcagcacaggtagaacgtaacaaacgcttgttgggacgtcaggctatctccgtgcaggaatatgaaattagcgttgccaattatcaaaaggcaaagtcagcttatgaattatccagcaataatatgcgggataccaaacttaccgctcccttcgacggttctattgaaaaacgtctggtagaaaactatcagcgcgtgaactctggggaaggcattgtacaactggtgaatacacaaaaactccgtattaaattcaccgtaccggatgattatctctatctacttcgggcaaaggacgtaacattcaaagtggtattcgatacctatccgggcacggtattcaatgcaaaactggaagaatatctggacatttctacagccggaacaggtattccggtaactattacgattgaagatcccgctttcaaccgttccctatacgatgtgaaaccgggatttacgtgcaaaatcaaattggcttcggacgtagctcccttcttggaagaaaagcttgtgaatattccgctcagtgccatattcggtgaaagcgagaaccagaaaacctatgtgtgggtagtaaaggataataaggtaagcaagcgggaagtaaccgtatactctcctaccggagaagccaatgctcttatctctgccggtatacagccgggagaaactattgtaattgccggagtgcaccaactggtggacggacaaacggtgaaagttatcaattagactaccaaccactgcgaccttgaggtcgcccaaatataaatcatatgaatttagctaaatatgcattagacaacaccaagattgtttatttcttcctggctgtgttgctaatcggcggtatactatcattcgaccggttgggaaagaaagaggatgcaccctttgtcatcaagtcagcggtcataatgacccgctacccgggggcagaaccagcagaagtagaacgactgatcaccgaaccgatctcccgcgagatacagtcgatgagtggtgtatataaaattaagtcggagtccatgtacggactatccaagataacattcgagcttcaaccttccctttccgcagaatccattccgcaaaagtgggatgaactgcgccgcaaggtgctcaacatacaaccgcaactacccgccggtgcttccgttcccacggtatcggacgatttcggcgatgtattcggcatatactatggcttggtaggcgatgacggtttctcttacgaagaaatgcgcaactgggcagaacgtatcaaaacccaggttatcactgctgacggagttatgaaagtagccttgttcggtacacaaaccgaggtggtaaatatctatatatccgtcaataaactggccggtatgggtatagatccgaagcaagtagcaagtctgttacaatcgcaaaaccagattatcaatacaggtgaaatcaatgccggtgaacaacaactgcgcattgtagccaacggaacctatactaccgttaatgacatccggaaccaagtgattaccactccgggcggacaggtgaaactgggcgatattgccgccattgaaaaaggatatatggatcctcccggcaacatcatgcacgtcaacgggaagcgtgccataggtatcggcgtttccaccgacccgacaaaagatgtagtaaaaaccggagaactggtagatcagaaactggctgaacttcttccccttattccggtagggttggaattggaaagtctgtatccggaaaatgtcatagctcaagaagcaaataatggtttcatcattaacctgatagaatccctactcattgtaattgttatcatcatgctggtgatggggctgcgtgcaggtatacttatcggcagttcgttgatattcaccattggcggtacgctgctcattatgtctttcatgggagtaggattgaaccgtacttcactggcaggtttcatcattgccatgggtatgctggtggataatgctatcgtagtgacagacaatgcacaaatagccattgcccgaggtatagaccggcgaaaagcactgatagatggagctaccggaccgcaatggggattacttggcgctacgttcatcgccatttgttcattcctgccgttgtacctcgccccttctgccgtagcggaaatcgtgaaacccctgtttgtcgtacttgccatttctttgggattaagctggatactggcactcacacaaaccaccactttcggtaactttattctgaaagccaaatccggcgataccaataaagacccgtatgataaacctttctatcacaagttcgcctctatcctcggagtacttatcaagaagaagactcttacactgggtagtatggtagtcctgtttatcatctcactggtcatcatggaaatgatgccgcaaaacttcttcccctcactggataagccctatttccgtgccgatatattctatccggacggttacagcatccgtgacgtggaaaaggaaatgaaaaaggtagaagcgcacctcctgcaacaaccggaagtgaaacgaatatccaccacattcggaagtacgccgttacgttactatctggcatctacttccgtcggtcctaaacccaactttgctaatatacttatcgaactgaccgacagtaaatatacaaaggaatacgaagagaacttcgaccagtatatgaaggcaaactatccgaatgccatcacccgtaccactttgtttaagctatcgcctgcggtagacgccgccattgaaatcggctttatcggtaataatgtcgattcactggtgatgctgaccaacaaagtcctggaaatcatgcatcgggatgatgatctcatcaacgtacgaaattcatgggggaataagattccagtatggaaacctgtttacagtccggaacgtgcccaaccgttaggtgtctcccggcaaagtatggcacagagcattcagatcggtacaagcggtatgacattaggcgaatatcgtgaaggcgatcaggtgctgcccatcctgctaaaggataacacagtcgattctttccgcatcaacgacctgcgtacactacccgtattcggtacaacacaggaaaccactaccctggaacaagtagtcagtgaatttgatttccaatataagttctcgaatgtaaaagactataaccgtcagatggtaatgatggcgcaagccgatccacgccggggagtaaatgccatagcagcattcaataagatatggaaagaagtacaagaagaaattcaggtaccggaaggatataccatgaagtattttggtgaacaggaaagtcaggcagaaagtaatgcagcattggcagctaacatgccactaacgtttttcttaatgtttattaccctgttgttcctgttcaagacctaccgcaagccaattgtcatcctattgatgttgccgcttatctttatcggaatcgtactgggattaatcttgcttggtaaatcattcgactttttctctgttctcggtctactgggattgattggtatgaatatcaaaaatgcaattgtattggtagaccagatcgatatagaagcggcttccggaaaagcccccctaaatgccgtaatcagtgctacaaccagccgtatcatacctgtagccatggcgtccggaactacgattctgggtatgttgccgttgctattcgacgctatgttcggtggtatggcggcaaccatcatgggtggtctgctggtagcctcagcattgacgctgttcgtgcttccggtggcatattgcgcgatacataagatcaaaggataaactccggatactcttaactattcgcttaaataagaaataaagagataattatgaaaaagataataaccatacttacattactttgcagcttcggactgaaatccggagcccagcagtacttaagccgcgaagcatatcgtgacaaagtagaagcctacagccaagtgctgaaacagcagcgcctgaaaaccagggcaagcactgaagcgcgaaaaatagcaaataccggcttcctgccacaaatagacatcacagccgaaggtaccgccaacctcaaccacctggataagtggaacagtccgaaaggtgaataccgcccctacacctatcaggcactcgcaactttggcacaacccctctataccggtggttctctgatagcccagaaacgtatggcgcaggctgacgaagagttaagccaacttaccacagaactgactctcgatcaaattcattatcaaagcgatgccgtttattggaatgcttcagccgcctatgccagtcttgaggctgctgctacatttcaggatatcataaagaagcagcacgatattattcaggatcgtttcaacgatggcgctatcagtcgtacagacctgctgatgatttccacccgccagaaagaagctgaattgcagtatatcaaggcccgccagaactatacccttgctctgcaacaactgaacattctgatgggagtagcacccaatacccctgtagatagcctaagtgaaatcagtatagccagtgaacccgttgacattcttggacttgacgatgtacttccacgccgtgccgattatgccagcacaacggtaaacattgcccggagtgaggcacaacgccatgccgccctcagcaagtacaatcctcaggtaagcatgttccttgccacaggttgggataccggtatcacgtacatgggacaggaaattccccatacgcctgtagccggagtaaacgtcagtatccccatcttccgttggggggcgcgtttcaagacaaaccggcaacagaaagcattcattggtatccagaagctgcaacaaagttatatcactgataatattcttgaggaactctccgccgccactacaaaactgacggaaacggagcaacaagtaaagacagcaaaggaaaatatggatcttgccgaagagaacctggaccttgtcactttctcttataatgaagggaagtccagtatggcagatgtattgtccgcacaattgtcgtggacacaggctcatacgaacctgattaatgcatatctggctgagaaaatggcagtggcagaatacaggaaagtgattagtgaataaagattcaggcgcggattacgcgcattacacagatttatttctttattgtaatgaaagaatccgtgtaatccgcgtaatccgcgcctaaaaagtccgcgttcgtccgcctcaatccgcgtcgtccgcgtatctttatcccaagaatgagatcaatacacccgcagctaccgccgaaccgataacaccggagatattactggacatacagtaattcagcacatggttcttcggatcatacttcgtagcaatctcattgcatacgcggcttgccataggcacagcactcagtcctgttgcaccaatcagcggatttatcttcttcttactgaacagattgaacagcttcacaaagaagataccacccgtaatggaaagtgcaaatgcaaggaaaccacctataacaataccaatggttgtccagttcaggaacgcttcgcttgtcatagttgcgcctacactcaatcctaagaaaatcgtcgccgcattcataatgctattggcagctgcatcaaacaaacggctggtgtccgcaccgatttccttaatcaggttaccgaacatcaacataccaatcaaaggcactgccgtcggtacaaagagagcgacaaccgtagtcactgctatcgggaaaatgattttcagtacacgcagattcttgatttccgtcttcgaaggatagagtttctcttgctccttcatattgatcatcaactccttcttagagcagaacaacttcactaccaacggaataatcaccggaaccaacgccatgtaagaataggcggcaatagcaatcggacccaacaaatgcggagccaacttgatagtcgtaaaaattgcagtcgggccgtcagcaccaccaatgataccgagagcacctgcttcctgcggtgtaaaaccaatcatcactgcgcacaacagtactgtaaagatgcccaactgcgctgccgccccgaagatggaaagatgcaaattacggagcatcggtccaaagtccgtcagtgcacccacacccataaagataatgggtggcaggaaacctgtcttaatcaacatatagtagataaagttcatcaatcccaagtcgtgtgcaatttcatgcaacggcatttcccagatgctcttcaacaccccatttaccattaccattccgttttcatccgcctggatgacacccatttcgccaccgggaaagttggcgatgagcacaccgaaagcgataggtaccagcaataacggttcgtaatgcttcttgatacccagatacagcaggatgaaagcaatggcatacatcaccagaaacgacgggtcttcaatgatattgctgaaggccgtcataccgtagagtcttccaaatatatcttccatgctgcgttatcctatcttcattaatacatcatcttctgaaatggtatcgcccggagtagcacaaatagcagtaactgttccgtcgaaatcggcacggatggcgttatacgtcttcatagcttcgatgtagcaaagcaagtcgcctttcttcaccttgtcgcccaccttcaacggagtttcctgtgcattcttcgtcaggaagaatttaccttccaacggagcaaccacatcctggccttcgcctacaggagcttccactttcgctgtagcatctgccggcaaatcaatatcaccgtaagctaccgttacgcgataagcctgtccatctacctgaacggtaagtgttttcggcttggcgtcgtccaacggagacttattaagttccgccttccgtttttccacgtctgccaggaagtcttctttcgccttgccactcttgtatgcttcgtattgtgccggatgcatggcatattcgaagagttcttcatcatcttcgcccaaatcccatttgttctctttcatcatcttgcgatacttatcgagcgcatccggataattatcctgtgggtttccggtaaagaacttacggccttcacgttcggctttctcaatgatttcgggagccagcgtacccggcaatttaccagctttacctaacagcatatcccagatatcatcagcaatcataccccaacgttccttacctttttccatagcaatcacgttcatcatcgccagattcttaacatactggctgaacggagttaccaacggaggataacctacgcgcggccatacataagccacttcattgaacagcttgataagcaactgatcctgcgtcataaacggcaagttacgtttcgccttatatttattgatagattccagattggactccaagtcagccatcaagctacccatcataccccccggaagtcccggaccgatcaacaaagagttcatcaagcggttcttcggactgatgtacaaaccgaggaagtcgtccataaattcctgaatcaatgcacgcactttcatgtatgcttccatattcacctcaggaacctggaaacctgcatctttcagcatagcctgcacactcagcaagtcagcgtgtcccgtaccccatgacaacggttccatacccacgtcaatataatcgcaaccagcctcgcaaacttcgaggatacttgccatattgaaaccgggacctgcatgactatgatattgaataggaatttcaggatgtgcagccttgatatttgctacgatcttgcccaatgataccggacgtccgatacctgccatatccttgatacagatttcatcagcacctgccttgatgagctctaacgccatattggtgtaatattctactgtatggataggcgaatgggtgatacagagcgaacactgggaaatcattccggcttctttagcgtaagcgatggaaggaataatgttacgggtatcgttcagtccgcagaacgtacgtgtaatatccgttccctgcactttcttcactttataaaacagcttacgcacatcggcaggtacggggctcatgcgaagaccgttcagtgcacggtccaacatgtgagtttgtataccagcctcgtgaaacggcttcgtccatgcacgtacagctttattaggattttcaccaaacaatagatttacctgttcaaaacctccgccattggtttctacgcgggcaaaacagcccatttcaacaatagctggagcaacctttaccagctggtctacgcggggcacatattttccggcactctgccacatgtccctgaaaaccaggctgaacttaatttcctttttcatactaaataaataggtgtgtgttttttattaaagattatcattttattttctcgaccttggccactttacccttgccttgtgtcaccactgttacagcggcactgatagcagccaaaatgtttccgggaattgcggcaggaccttgcgcacctttcttatccggcactacctcttcaggggcgtacttgtttaccagaagaataagtcctttacctaagtagattacaatcagcaggatagcgaacactgtcgtcatacctaccaccatcagcaaaagcgctgtgttgagattttccatattataaattattagttattcggtctgttttacaaaaaatcgtccgaaattacggattatcaatgaaataaaatagaaaaataacactaaaagatgctaaaacgaaagtttccatgttctcccttcaagcggagggattgcatggaaacgatctgtcagaagtcacagaatgtcaaaagctactgaaccgatgaagcaagaggaaatcagcccaacggattttcatcaagaccaccgtcaccggagccaccttgatcgccgccgtcatcaccggcatttcctccaccggcgttgccggtcttgccagcccactcttcccaagcaatcttcgtatttaccatactacgggtagtcacttgattaccactgctacgctccacttcgggtaggaagcgaacacgcacccctctaatcaatgaggcgcttacctcttcggccgtcggcaccccttttgtagcggaaacagctgtataatagaaagtgcccacgccatctattttcacagtacgtccctgtcccatataattacttaatactcgtcctaagttttcaatcaccgcatacgtgtcaccacgagtcacggtagaaatggcagacagttcatccgccacttcgcgagtagtcacaggtttgccccaagtaattgattgaggataccacaaattgttaattggtttcttggttcttttaaaaaatgccataatcgtaatgtttttaaatgattaatttaataatgtatttatctcttccatctcacccgagaagcagatgttttcaccgtgaggcctcaacgattcagccatctgcttttctcaaattcgatgttgcaaagttagggtgagatacaagagaaaacaagaaaatgacatctacagccaatttacataaaccgataatttacaacacattacaagacaaacatctctacagggaagaaaaaggatatgaagctattaaaaaacaacatagcagcaatctctacagagatgatgcgtaaactactgataatgagtatttcgttttttgtcggtctctacatatcatgattctatacttgatgccttatcgcttcatctattaagtatatcacttacggataaacatagttaagcgacctgtttaacaaaactaatttcgaaaatggcaaaaacaaggcggttctagtgaaacaagtttatttaatttttaatcgtccaccttttagtggacagcaatgacaaccagtattaaacaaacctaccagtaattcaataattattcgtagtatcccttataaattaccttttatagatataatataatcaaaaagatccagatgcgatccgaatccgcgtccttccttgtaatataattttataaccaagaaatattctgtttttactattgatccaccatagtcctcccccccctctcagcccctttctgcagtggggtacctcagtcccatactaagataccctaagtatcatactgagactatctcaatataggactgagataccctatatataagactgaaataatatcacttccggaaaaagttcgaatacaaagttataccggagcgtttttgttggaatatttttaggtcattacagattttacaccgctaaattattaatcagtatccccaaacaaatccgtccaccgtctccccatccttaaacagtgtctcctcctcttgcatcagccttttcttcagcctgaatttttgttgtgaaaccgaggcaggcgacaccgcaataagtgtagccacctgtgcattcgtaaagcgcagacgtatcagcagacaaagttgcaggtcggcggcagtcaatgaaggaaaacgtgtggcgagacggttggtgaagtcactgtacacgcgattagcaagttgcgtcaagtgttcccagtctttatcagaaagaaacttgggctgacggcgcaggcgttccaccacgtcgtcacggtctatcaacgttgaagtaagcgtctgtacttgcttatcaagcagacagatgcgttcgttctgcttctccagcaattccgcttcacgaggcaacggacacttttcatattccttaagacgaatgcggagggagttattctctcctcgcaagaacacattccggtccgtgagattcaacaaagactcttctacttctttacgctcttcgtccgtcaacgccatttcgttcaaacacgcttccaattcttcgcgttcacgttcgttgttacgcaggcgttgttcgttctcgctcaaatttacgagatagcggcggtgcttgcgatccttggaaaactggatatctttgatggaaagccatacattgaggcctatcatcagtgcggtgaatgctccccacagatattgtttccgcttgtcagcgggctttatgcgaaccagacttccaccggaatgttccttcacctgattgtattcactgtgcaagccggagagcaaacgagctatccgggcactgtcggcagcgccagattgtaccagcgagtcggcacgggcaagggactgttcgtagttcatcaaagtcgggtcggcaggtttcgagcaggctgtcaggccgaaaaggaaagtcaacaagagaagaagagacgcgtgtttcatcttgaatgtatctattaatataataaggtaaatttatctattaatataataaggtgcaaaggtagcactttctccctacaaaaaagcacgggaggcataaactttttaacaagctcatgcctcccgcactttatcaatcaagagaacagccttactttaaacgccttgacaatcgtgaaggctcacggcgcatgtcccaaaggtcggagatatagacaatatcttcttctacataaaaaatcagcttattatatttacttactatcaatccccgatataatttatcccggtgttttaacaacagctcctgatgtgccaactcaggatttatggctatacgagcttcccatttagccacactttgctcaaattcttcagcagcctttctaccaaattcacgatagatgtagcgtactgtattttcccattcatgcagagcccggggtgcccactctaccttcatagatttgctataaattgtttcattcgctgatgcgctgcttcagcaggtactcctttgcccgcagcaaattccgcttccgcctcatcaatccttgcattcagttcgtccatcgtatatggagcaagacctttggcattcattttttccaactccatcatcctcaaatttcgtctctgcattgcacgccgataagcccgacgcgtcgttctcagcacatccagatcatcagtagccaatatatcccgagccagttcattacgacaggcattcaattccacagttgccataaccaaattgttttaatcattatagatacaaagataactctttatccttatatataaagaatacagggacacaaagtttctattctttgcatccctgtatctgtcaatcccaattcagaatacgaatcagaactcgcttgtaaagtggaattttatattcttgaagtccatctgagccatttgcagcacataaccactatccgccaggaagacatccctcccctcacggtctttcgccatatactgatacttacgcttcttgaatgcttccagttcttcaagattatcgctctctatccagcaagccttataaaggctcaacggctcccaacgacacttcgcactatattcattctccaggcgatactggataacctcaaactgcaactgccctaccgtaccgataatcttccggccgttgaactggttgataaacaactgtgccacaccttcgtccatcaactgatcgatacctttggcaagctgtttctgtttcatcgggtcagcattctcgatatacttgaacatctccggtgagaaactcggcagaccacggaaatgaagcatttctccttctgtcagcgtatcaccgatcttaaaagaaccattgtccggcaaaccgatgatatcacccgcccaagcctcgtcaacagtcgtcttacgctgtgccatgaactgtgtgggcgaagaaaaacgcatcgtctttccatgacgcacatgcaggtatggagcattacgtgtaaatttacctgagcaaatcttacagaatgcgatacaagaacgatgattcgggtcgatattcgccgtaatcttaaagacaaatccggtgaatttaggctcttccggttccacttcacgttcttccgcctgtacaggacgagggcttggagctatctctacaaagcaatccagcaactcttgcacaccaaagttattcagagctgaaccaaagaatacaggtgccagttcgcccttcagatattcttctttatcaaattcaggataaactccatctatcaattccaactcaccacgcaacttatcagccaattgcgcaccgatttgcttatccagttcttcggtattgatatctacctccaccttttccgtcaccacttgcttggaaggctggaaaagattcagattgttttcgtagatgttataaactcccttaaagcgcacaccactttcgataggccaggtcaacggacgtacatgaatggcaagctcttcctccagctcatccaacaaatcgaaaggatctttggcctcacggtccatcttattgatgaatataatgaccggcgtattacgcatacggcacacttccatcaacttacgcgtctgtgtttccacacctttggcaccatctacaacgatgataacgctatctacagcagtcaacgtacgatatgtgtcttcagcgaaatcctggtgaccgggagtatcgaggatattaatcttatactctttatagtcgaactccatcacagaggtggttacagagataccacgttgcttctctatatccatccagtccgatgtagcggttttctttatcttattgctctttacagcacctgccacttggatctgtccaccaaaaagcaatagcttttcagtcaaagatgttttaccggcatccggatgcgcgataatcgcaaaggttcttctcctctcaatttcgttattattggccatatataaaatttggtataatattattattgggcattcagtttttcaatacatactttcagactctcttcccaatgaggtacttcaatgccgaaagtctttttaatcttcgtcttatccaatacggaataatgcggacgtggtgcctttgccggatactcatccgtatgtaagggactcaccttgcatgtcgtgatatccgcaatgcgatgtatagccaccgtaaaatcataccatgaacatacgccttcatcactgaaatgataaatacccggtacaataccctgattaatggcagcatagatagcttgtgccagatcatttgcatacgtcggcgtaccaatctgatcaaaaaccacacctaaagactcacgctcacgtcccagacgaatcatcgttttcacaaagttatttccataaatagagtataaccatgctgtacgaattaccatcgctttctcacaattctgcataacctccttttctccacccagcttggtaaagccgtaaacagaattaggacagggttcgcaatcttctttataaggtatatgcgctgttccatcaaaaacataatccgtagaaacctgtatcatagcagcaccatgggcctgagcagcacgtgccagtattcccggagcttcctgattcagtttgcggcacaattcttcattatcttccgctttgtcaactgctgtgtaagcagcacaattcactacaacatcaatctgattctctgcaatgcaagcctgtacagcttgttcgtcacagatatccaattcctgtacatcagtaaaaaaataagtgtgttgcggattctcttttgcaagaacttgcatctcgttgccaagttgtccgttggctccggttactaatactctcatgctttatctattatttacaatttactatctttgaaagctgtctctgttactcatccagtttcagttctcccttcttgtccttttcgtaataattggcaagcaaagaaatgaaactgctgatggcctctattgcctttgcggttccctccgtgatttctttcttctgcaaacgcagcaataaaacaccatacaaagcctcaaaacaggtttccagttccggttcctcctgcttcccactcttctgacgaagttctacgatgaaaggcaatgctttgaaataagccgcactataataaggatatttcggtgatgccagcagttctacgtgcaattccgtcaaattcactattacattacgattgatttgcagatgtcccttttccttcactccttctgtacgcatcatgtctaccagattaccataccattcttcgagtgccggatgttcttcttccggataacgggagataatgttttcgcggatcttatcgatatcgcactcattggcacgtatcaaatcttccacttgccacatatatataaggtattccgcgatatttttcgctttcagttgttgcgctatcttcatgattctatgtttctgctcagtaaagtgactcgcccatcaacgtaaacaccaacccaaacacagacacgacaatgacaatgcctccgatgatacgattcaatatccagatgccgcgcaggttgaattgcgtacggactttatttacaaagtaagtaatgccaaaccaccacgccaacgcccccagcgcaatagccaggtatccggtgaccgcttcaaacaccaataccccctcactgacaaaggcaaagcgtgcaaagaggccgataaagaggaatataataagtggattggataatgtgacggcaaaggcggtaatgaagttatgaaaataagagcctttgttggttgagacgggacggatggactggacgggattactgcgaaacgtataaatgccaaacgctaacagcataatgcttccgaacaactgcaaataaaagatatttttatttacgtaatcgaatacgaaactcattccgtaccctgtcagcaaggcgtaggcaatgtcactcaacgaggctcccagacctgttatgaaaccataccaacgccccttattcaacgtacgctggatgcacaacacacccacgggtcctaatggcgcagacacaactaccccaataataaaacccttccataatatatcgaatatggtccttatctcaatcatggctgcaaatatcgtacttttttatgagacgaaccaattgtgttaacgttttttcgaccgattatcataaaacactcaatactttacttttgacacccttctattttttattccttttctttctctgcaccaacgattttatgtatctttgcgccaaagaacgaaaaatcaaaaatatcagtatgattctttttttcagaaccccatccaagagcgtgatggccgtagaatgtgaccacgcactcacccaggcagaaagcgacaaactctgctggctttttggagaagccacccccgaaagtgaagaaaacctgaaaggacatttcgttggtccgcgccgcgaaatgattactccttggagtacaaatgctgtggaaatcacccagaatatgggcttgagcggtatctcacgcatcgaagagtatttccccgtaaaggacgaaaacgctgaccgcgacccgatgctgcaacgcatgtacaagggactggatcaggaagtattcaccaccaaccgtaaaccggaaccgatcgtccatatcgaagacctggaagcttacaacgaaaaagaaggtctggcactctctaaagaagagatggactacctcaagaaagtagaacaagaccttggacgtaaactgaccgactccgaagtattcggtttcgcccagatcaattccgaacactgccgccacaaaatcttcggcgggacattcatcatcgacggtgtagaacaagcgtcttccctcttccaaatgattaagaagactacacaggaaaatccgaataaaatcatttcagcttataaagataatgtagcctttgccgaaggtccggtaattgaacagtttgctccggcagaccactcaaaacccgactacttccaggtgaaagatatcaagagtgttatctcactgaaggctgaaacacacaacttcccgactaccgtagaaccgttcaacggtgcatctaccggtacaggtggagagattcgtgaccgtatgggcggtggtaaaggttcctggccaattgccggaactgccgtttacatgacttcatatccccgtacagacgaagatcgtccctgggaagaaatccttccggtacgccaatggctgtatcagactcccgaacagattctaatcaaagcatccaatggtgccagtgacttcggcaacaagttcggtcaaccgctgatctgtggttctgtactgactttcgaacataaggaaaacgacgaagtttacggttacgacaaagtaatcatgcttgccggcggtgtcggttacggtacgaaacgtgactgtctgaaaggtgctcccgaagccggtaacaaagtagtcgtgattggtggtgataattaccgtatcggcttgggtggcggttccgtatcttcagtagataccggacgctacagcagcggtattgagttgaacgccgtacagcgcgccaatgcagaaatgcagaaacgtgcctacaacgtggtacgtgccctctgcgaagaagacaacaatccggtggtatccatccacgaccatggttcagccggacacgtaaactgtctctccgaattggtggaagaatgtggtggcgtgatagacatgagtaaattgcccgtaggtgacaaaaccttgtctgccaaagaaattatcgccaacgaaagccaggaacgtatgggattgctgattgaagaagaagctatcgagcatgtacgtaaagtggctgaacgtgagcgtgccccaatgtatgtggtaggtgaaactaccggtgaccatcgcttcgctttccaacaagctgacggtgtacgtccgttcgatcttgccgtagaacagatgttcggctcgtctcccaaaacttacatggtggacaaaactgtggaacgccactacgaaatgcctaaatacgaacaatccaagttgcacgaatatctgacgaatgtattgcagttggaagctgttgcctgcaaagactggttgaccaataaggtagaccgctcggtaaccggcaagattgcccgccaacaatgtcagggtgaattgcaattaccgctaagtgactgtggcgtagttgctctcgactatcgtggtgagaaaggtatcgctacttcactgggacatgctccgcaagctgcactggcagatccggcagcaggttcagtactttccgtcagcgaagcactgaccaacctggtatgggctccgatggctgaaggaatggacagcatctccctctccgccaactggatgtggccttgccgctcacaggaaggtgaagatgcacgtctctacactgctgtaaaagcattgagcgacttctgctgtgcactgcaaatcaatgtgcctaccggaaaagactccctgtccatgactcagaagtatcccgacggtagcaaagtaatctctccgggaaccgtaatcgtttccgcaggcggtgaagtttctgatgtgaagaaagtggtttctcccgtacttgttaacaacgaaaagacaacgatttatcatatcgacttcagttttgatacattgaaactgggtggctctgcctttgcgcaatcattgggcaagattggcgacgaagtacccactgtgcaagatgccgaatatttccgcgatgctttccttgccgttcaggaactggtgaacaaagaactgattcttgccgggcacgatatttctgccggtggtctgattactaccttactcgaaatgtgcttcgccaatgtagaaggtggtatggaaatcaatctcgacaagatgaaggaacacgacctcgtgaaactcctgtttgccgagaacccgggtattgttatccaggtaagcgacaagcataaggaagaagtaaaacaaatattggaagatgccggagtaggttttgtgaagattggtaagccgaccgacgaacgccacatcctcgtatctaaagatgatgctacttatcagttcggtatcgactatatgcgtgatgtttggtattctacttcttacctgctcgaccgcaagcaatctatgaacggttgcgccaagaagcgtttcgagaactacaagatgcagccactggaattcgctttcatgcccggcttcaaaggtaaattctctcaatatggtatcgacccgaaccgccgtacaccgacaggcatccgcgcagcaatcatccgcgaaaaaggaacaaacggtgagcgcgaaatggcttactccctgtatctggcaggctttgatgtgaaagacgtcaccatgaccgacctcatcagcggacgtgagacactggaagacgtgaacctgattgtttattgtggtggtttctccaactcagacgtactgggttctgccaaaggttgggcaggagctttcctcttcaatccgaaagctaaagaagcactcgacaagtattacgcacgcgaagatacgctttcattgggtgtttgtaatggttgccagttgatgatggaattgaacctcatcaatcccgaacataagaaaaacggtaaaatgctgcataatgaatctcataaattcgaatcgagattcctgggacttaccattcctaccaaccgcagcgtaatgttcggctctctgagtggcagcaaactcggtatatgggtagctcacggagaaggaaaattctctttgccttacgacgaagataaatataatgtggtagccaaatatagttatgacgagtatcctgccaatccgaatggctccgactactccatagcagccatagcaagtgctgacgggcgccatctggctatcatgcctcacctggagcgctctatcttcccgtggcagaacggttgttatcctgccgaccgcctgcacagcgaccagatcactccatggatggaagccttcgtcaatgcacgtaaatgggtagaagaaaaggttaagtagttctgactacaatctataagtgaagcacaggcgcaggttataatatacaacttgcgcctgttgtcgtctaaacaatgcgaggaatcgaacactattcttcttgctttcgtgttgcttttatcaaacaaaatgcatatttttgcgttaatttcacaaatacccccaataacgaacgaccgtaactgttatgagaaaatttatcattttctttttattcacatacatttcctccttctgcatcgcccaaacttataaatatctcggcgtggaagatggcttgagcaaccgtaggatatatgctattcagaaagggccgaaaggatatatgtggtttcttacgcacaatggcattgaccgctatgacggaaaaaatttcaagcaataccgacttatagacagcgaaatagaagttaactccatgctcaatctgagttggctatatgttggtgtggatggaacactgtgggaaataggcaaaaaaggaagagtattccgctatgatgccaaacatgatcgattccaacttgtatacaagctacctgatgaagtggtaaaaggaaacccgactcccgtaagctatggatttattgacagcaacaatattgtatggctctgtaacgaagaagcattgtatctctacgatacgaatactgaaaaaactaccattatcaaaaaccatatcggagaaagtattacggatatcgagcaaatcgaccctgaccattatttcatcggtacagacgtcggtatacatcatgccgaattaaaagacaacgttctcaacctttctccatgcaactggcttgataaactgaagatgcaagtcaacgagttatatttccataaagcaaaccgcaaactattcatcggtacattccagaaaggcatttatctgtacgatatgaatattcatcaaactgtagagttgaatgtcggtttgcaggatgtcagcattacacgtatcaaagccttcaatgacaaagaaatattgatagctacagatggtgccggtatatataaaatgaatgtggatacctatgagtgcgccccctacatcgtggcggattacaatagctataatgccatgaacggcaacagtatttacgacttctatgtagatgatgaacgtatttggatagccaattaccctatcggcatcacagtacgcaacaatcaatatgccagttatgaatggatcaaacattctattggcaacaagcaatcgctcgtcaacgaccaggtaaatgccatcatcgaagatcacgaaggtgatctttggtttgctaccaataacggtatcagtctctactctaccaaaacaaaacaatggtactcattcctcagcgtgtttgacaatggtaacgtaaccaaaaaccatgttttcatttctttgtgcgaggtatcacccggcatcatctgggcaggtggatacacttcgggcatctaccaaatcaataaaaaacagatgaaggtagagttctttactccttctacatttggcgattgtgatatccgtccggataagtacatacgctctatcataaaaacgtccgatggcagtatctggtccggtggctattacaatttaaagcaaatagacttcaaccgtaaaaatatacgtgcttatccgggacttagcggaattacggatattaaggagaaggatgcgcaacacatgtggataggtactgccacaggactgtatctgctggacaaagaaaccggcaagtatcagtgtatatcgatgccgatagagtctttctacattaacgcgctttatcagacaccagacagtttgctgtacatcgggaccagcaactccggattactcatttataaccatcagcgaaaatcgtttgagcatttccacaaagacaactgcccgctgatttccaataacatatataccattcttccggacggaaacaaaagtgtcctgctgagtacggaaaacagtctgacaagctattacccggctggaaagatatttcataactggactaaagaacagggactgaagagtgatcattttaattcaacatcaggcgtactgcgaaaaaacggaaacttcattcttggaagtacggacggagcaatagagttccacaaagatatgatgattccacgcaattatgagttcaaaatgatattcagcgatttgcgcgtattctatcaaaccgtttaccccggcgacgagggttcaccgctggaagtggacatagatgaaactcaagtattaaagctgaaatacaatcagaacatattctctctacggatatcttctatcaactacgattatccgtcattggttctgtattcctggaaactggaaggtttctatgacggatggagtcgtcctgagaaagattgcatgatccggttcacaaatctgaatcccggaaaatatacattacgggtacgtgccatctccagtgaagaccgacgaatcgttcttgaagagcgtgacatggaaatcatgatagaacagcccttatggcttagcatatgggcattaatactttatgccgccgtgatagccgcgattgtcattatcacattgcgtgtcattatcctgcgcaaacagcgtaaggcttcggatgagaaaatacgtttcttcatcaatacagcgcatgatattcgtaccccgttgacactgatcaaagcaccactggaagaactcagtgaaaaggaaaatctgacaccgagcggacgaagcaatatgaatactgccatacgaaatgtgaacgccctgttgcgactgacgaccaatcttattaacttcgaacgtgcagacacttattccagtgccctatatgtatccgaatatgagttgagcacctacatggaggaaatgatcaatgctttccgggcttatgccgacgtaaaacgtatcagcctgacttatgaaagtaatttccgctacatgaatacctggcttgacaaggataagatggattcgattctgaaaaacctgatatccaatgccttgaagtatacaccggaaggtggaagcgtacatatctatacagcagaaacagaagactattggagtgtggaagtaaaggatacgggtatcggtattccgtcctcagaacagaaaaagctctttaaaatacacttccggggtagtaacgccatcaactcgaaagtaacgggtagtggtatcggactgttactggtatggaaacttgttcacctgcataaaggcaaaatcaactttacaagcacggaaggaaaaggctcctgtattaaagtcacattcccaaaaggtgaaaaaccttatcgaaaagctattcacagtccgaaaccgggaagtgagaaagttgcttatgctgaatcgggagtgcctaagaatgttacgccaaacattgcttatgatgcaactaaacagaaacaacagcaaaacagtgatcttccgaaaatcctgattgtggaggataatgatgaattgagggaatatctccgcaatacactgtcggacgactataacatacaagtatgcagcgatggcaaacaagcactcgaaatagtcaaggaatatatgcctaacatgattatttcggatatcatgatgccggaaatgcgcggagacgaattgtgtcatgtcttaaagaatgatattgaaacctctcacatccccatcattttgctcacagcattgaacaatgaccgcaacatcattgaaggattgaagaccggagcagatgagtatattgtgaagcctttcaatataggtattctccgtgctacgatatccaacatcctgacgaatcgctctttgctgcgacataaatatgctaatctggaactgaatgatgatgaagatgccacaacttgtaccaattgttccaccgaccttgactggaaattcatttcttccgtcaagaagcatgtggaagaaaatatggataacggtgcactcaatgtggaaatgctctgttcattactgaatatgagtcgtaccagcttctataataaaataaaagccctgaccgaccaggctccggcagactatatccgattgatacgtctgaaacgtgccgcacaattactgaaagagcagaaatacagcataactgaagttgcagaaatgactggtttcagcgatgcgaaatacttccgggaagtattcaagaagcatttcagtgtcagcccgagccaatatgcgaaacagaaagaagaaggggaagaaggggaataaagtggtagaagtgatatcatattataacattaaaactatgaatatttatttagaggcattcggccttttttctaaaataggagttttcactatcggaggtggctatgccatggtgccactcatagaggaagaaattgtagagaaacgaaagtggatcgccaaagacgattttatagacttacttgccatttcccaatcgactcccggcattcttgcggttaacatttccatttttatcggatataagttgcggggaattcgtggaagtatagtcactactttagggacaattctaccctcattcctcattattcttgccatagctatgttcttccacaattttaaggataatccgatagtagaacggatattcaagggtatccgcccggcagtagttgcactgattgccgctcctacattcagtatggctaagtcagccaaagtcaaccgttacaatgtctggatacccattgtatctgcactaatcatctggctactgggattctcacctatctgggtaattatcatcgccggtgtaggaggatacttgttcggacggctacgccgtcccaaagttgaaagttgagaaagttggctgcgcatcataaatcataaattataaatcataaatctcctatgctttattttcagttattctatacattcttcaaaataggccttttcggctttggcggcggatatgccatgctttcgatgatacaaggtgaagtagtcacacgctacgggtggttgacaccacaagagtttacagatattgtagctatcagtcaaatgactcccggacctatcggaatcaactcggcaacgtatgtaggcttcacggctaccggaagtatatggggttctgtcatcgctacttttgctgtagtacttccttcattcatcctgatgttagttatcagtaagtttttcctgaaataccagaaacatccggctgttgaagcagtattcagtggattgcgcccggcagtggtagggctactggcatcagcggccctggtattaatgaatacagagaattttagttcacctaaagaagatatgtactcgtttatcgtcagttgcatcatcttcctggtggcttttgtgggtacccggaaatataaagtcaatccgatagtgatgattataggctgcggaatagcaggtttcatattgtattaacaaaaaaggtgaagcttatagcttcaccttttttgccactatcttcgactcattatgcagtcggtcgagtgctgttaccacatagcgatatttagtctttccattttcatagggtaacttatagaagttatcccgcgtgatggctacaatatgagaaggatcactgatgtccactttctctttagcatcgaaacggtaaatcacatactgtacggcacgatccatttcatccttatacttcggtgctgtccagaacaaaagatatccatcttctgtccacaccggtttcatcttacgcactttatccggcgcttcattatccatgaaatcaaaaacaggaggcaaggcgggatatttgtggtattcagccatcaaagcatcacgatactttccggcattctccaccactgcacttgcaggccactgacaacttccgccaatcgtctgataagcacgttgcaacgccatcttacgtggaagctggttcatggaaggagtctgcggatcagcattctgcaccgtattcattaccgactgaccgatgaacaaaggacgattttccgtattctttgcccaccacttcaccaatgtctcataatcagctaccggatgacctatctgccagtatatctgcggaatgttatagtctatccaaccttcacgggcccaaagaagcacatcagcataaagatcatcatagttttgcaaaccattagtcttactacccagcggatcactcttctgattacggtaaataccaaacggagaaacaccgaacttaacccacggcttcaattcgcgcactgtctcatgaattttctttatcaacacattgacattactgcgacgccaatccgctttattagaaaatccaccgccataacgggcaaagctggcatcatccgggaagtctactccctgtttaggataagggtagaaataatcatccatatgaatagcatcaacatcgtagcgggaaacaatatccgtaatcaccatacagatgtggcgacggctttccggcaatgcagggtcgaaatagacttggtcaccgtaagtaacaaaccattcgggatggatattataaacatggcccggagccaattcattcttcagtgaagtcttcacacgataaggattaatccaggcatgaaactccataccacgcttgtggcactcttcaatcataaattccatgggatcccaataaggattgggtgcttgtccctgtacaccggtcagaaagcggctccacggttccagttgcgaagcatagagagcatcggcttcgggacgtacctgaaagataatggcattaatgcctgcctcttgcagggagttcaactgactgatcagggtctgtttcaacttctcggtgggaattccgcggaattgtccgttaacagcttgtatccaggctgcacgaaattcacgtttggggtatctttcgggttggaattgcgctgccactgtcagagaaaagagcagggcacatacgcacaaaagggttcttactttcattctttataaaatctgattagggtttattcaattcattggccattcaacaactacacggacgccactattgtacgaagtatccaggtaaatctttccatctacaatatccatcacctgacgggcaatggaaagtcccagacctgtaccgggagtaaagctatctactttaaagaaacgctcgaaaacagtttcctgatattgcggctcaatgccgataccagtatcttctattatgaaacgtatgatattattctccttatcttcctcgcattgcagacggatcacacccttttcggtaaatttcccggcattatccaacaaaagggtaagcacacgtttcatccaggcccgtaccgtctgtatcaccggggcatctggagagggaacccattgcagttccacaccttctttctgcttcccacccaactcatctatacattcaagacagcaggcattcacatccaccgcttctttgggcatatccgcagtctgtgagtccatatcggcaatatctataatattatcaatcagttctaacaaataagcactattcttctctacctgactggaatattcacgggcatcttccacatccaagccttcttcggcaagcaatgcagaaaaacctactacagaattaagcggtgtacgcaactcatgcgtgacgtgctgaatgaacgaactcttaatgcgccccatcttctgcaattccttacgagcaacatccagtttccggttcatggaaagagtacgaatataaaggtaagtaaccaatatcaatagcagcaatatcacacaacccgccccaaacacaaaagccagacgctcacggctcattttctcactcagttccagcttctccatcttcagacggtcaacctcaaactgagcggtatatttgttcagctgttcatccatctctgccgtacgcacagaatcattcaactgagaatactctgcaaaagcacgacatgcctctttgtaatgtccggtctgttccagcataatggctttttgccggtagtttcccggataataattgcctatcgaacgctggtaatcaatcagagaatccatataagccacggcattgcctatgttacccaagatctgactgcacataattttatagccgaaccagccctcctgtgaaatagactctttatttttaagataataagcatttgcttcacgaatataaggtgctgccgctttctctccttttatccccaaaatagcaataacccggaactgataatagcgcatatacaaagcttctcctattacaacatccttcccctctactgtcttccccaactgtcccaaccggtccagataaggcacagcgtcactatatgactgacgtgccagataagtttgaatgatattgagggaaacgacataagcatcacggtaatatttgccttcttcaaagtgcttcaatgcactgtcataatattcaaggcatagctttatattctgaccgaacacacggtgattataacctatacacatttcaccggatgccatgccgtatttatctttccgtttctcggcgtctttgcagagtaaatccgtctccttcatcacctcttcctgcaaccccttctcggtcattcgctggatgtactgcctccatgcctgatagcgatcggtattacggtggcaacgatctgcccagtccatatattcataagtcaccaggcgcaaactgtccgtatctcctaattcataataatgactggcaagaatagcataagcgtcactgatattagccgtatctttccgctcttttgccaattcaaggaagtgcatacccaaaggtagaaaattcggtttaccattcgctttccgtacactgtcggcaagcgatttcagatcaattgtatcttgtcccataactgtcccgaaacaagaaaacaagcataccaacatggcacacaggcatatccgagggtattgcataaggatgattggtttttaaaatgcgcataaaaatagtgcttttcccgcttgtatgtcagcaactatttaaaagtataacaaatcttaacctgccaatcattatacatatttgaattgcagtgattatctttgcaacttaaattcactttagtgactcagattatgaccaaaaacaactccatactcatcaaaggcgcacgcgtcaacaacctgaaaaatatagacgtagaaataccccgaaacaaacttgttgtcatcaccggattgtccggttcaggtaaatcctccctggcattcgacacactttatgctgagggacaacgtcgttatgtagaaagtctgagcagttatgcccgccagttcctgggacgtatgagcaagcctgaatgtgactttatcaaagggattccgcctgccatcgccatagagcagaaggtgagcagccgcaatccacgctccactgtcggcacctctactgaaatatacgaatacctgcgattattgtatgcccgtatcggacggacattcagccccattagcggagaggaagtaaaaaaacattccactgaagatatcgtaaactgtatgttaggctatccggaagggacaagatacacagtgctcgctccgatactactgcatgaagaccgcacaatgaaacaacaactggacattgatatgaagcagggcttcaaccgtctggaagtaaacggagagatgatacgcattgatgaatatgaaccaaagaaaggagataccgtttttttattgatagaccgtatggtagcatccaaagaaaaagatgcggtcagccgactgacggactctgccgaaacggcgatgtacgaaggcgacggtgcctgtctgctccggttctatcagcctgacggaaccaccagcctgtatcgcttcagcaccaaattcgaagcagacggtattgcttttgaagagccgagcgaccagatgttttccttcaactcccccatcggtgcctgtcctgagtgcgaaggtttcggtaaagtaatcggtattgatgaacatctggtggttcccaaccgttcgctgtccgtttacgacggtgctgttgtctgttggcgtggcgaagtgatgggtgaatggaaagatatggtgatacgaggtgccgaaagagccggattccccatctttacaccttactatgagctgacggacgcacaacgccggatgctatgggaaggcactccttacttccagggtatcaacgccttctttaagatggtgcaggaaaatcagtacaagatacaatatcgcgtgatgttggcacgttatcgtggcaaaacactgtgtccgaagtgccatggcacccgcttaaaacccgaagccagctatgtacgagtaggaggacgaaatatttcccaactcgtagatctgccgattacggagttgaaaaacttcttcgataacctgcaactggataagcacgacaaagatgttgctacccgtattctcatggaaatcaacagtcgtatccgcttccttctcgatgtcggattgggatatctgacactgaatcgtctcagcaactcgctttcgggtggtgagagccaacgtattaatctagccacttcactgggcagcagcctggtaggttcactctatatccttgacgagcccagtatcggactacacagtcgcgataccgacaagttgatacacgtattgcgtcaattgcaacaactgggtaatacggttgtcatcgtggaacatgacgaagaaatcattcgtgcagcggattacatcatagatatcgggccgaaagccggccgcctgggcggacaagtggtctatcagggagatatgaaagatttgcagccgaacagcgacagctacaccgttcgttatctgctgggagaagaagaaattcctgtcccggaacatcgccgcccatggaataactacatagaactgaccggggcacgcgaaaataacctaaaaggggtaaacgtgcgctttcctctgaatgtaatgactgtagtgaccggcgtcagcggatcgggaaagagtaccctggtacgtgatatcttcttccgtgccctgaaacgcgaactggatgagtgcagcgaacgtccgggcgaattcgcttctatcggcggtgacctgcaaaacctgcgaaatgtagaatttgtagatcagaaccctattggcaaatccagtcgttcaaatcctgtaacttatatcaaggcttacgacgaaatccgcaaactatgggcagatcaaccacttgccaaacaaatgggatacactgccggctacttttcattcaacagtgagggcggacgttgcgaagaatgtaaaggtgacggaaccatcacagtagaaatgcaattcatggccgacttggtgttggaatgtgaaacctgccacggaaaacgcttcaaagctgatacactggaggttaaattccatgatgctaacatctacgatgtactggaaatgaccgtgaaccaagctatagagttcttcactaaacacggacagaagaagatagtaaaaaaactcgctccactacaagatgtaggattaggctacatcaaactgggacagtcttcctctaccctttcaggtggtgaaaaccaacgcgtgaagctggcttattacctcagtcaggaaaaggcagaccctaccctgttcatcttcgacgaaccgaccacaggactacatttccatgatattcgcaaattactggaagctttcgatgccctgatattacgtggacactccatcgtaatcatcgagcataacatggacgttatcaagtgtgccgactatgtgatagacctcggaccggaaggtggtgacaaaggtggaaatctggtagcggcaggtacaccggaagaagtggcaaaatgtgcggcaagttatacaggacaattcctgcaagaaaaactgcacatgaaataattgagtgaaactcatctcatgagacggattattctgtctcgtgagataaaaatatccgtcccatgagataaaaaaaatcgtcccacaagacaaattgttttatctcatgggacaatttataataatctgcaaagcggaaaaatcttagcttgctttattcatagcaggagttatgtaagttagaagtagaaaccgaaaccaaccttcagaccaaataccgaacggtcaccgtttacgttccaatacacagccggctcaagtgtcaccgtcctcgacagaaagaaagcgtaccctgcttccgcaccgaaagaaaacttggtatcatcgcttgtcccccaatcccaacggtctacgttgacatcagcacccagatatagaccaatcttactgaaataataacgaccgcccacaccgagtgtataaacatccgtatcacctcctttttcattccatttggctcctgcatgtatcaataacgccacattatccagcagaaacgcaccacctttggcttcaatgccaaatgaagtcttgtctgtctctgtattatgcgacaaacctaagccggaaatcgacggattcaagatccactttcctttttcaaactgtgcctgggcagccactgtggccacaagcagacaaacgagtaatgctaattttttcattgttacttattagtttttggtgttattgtacttttcatcttcctctctacgttttcgctgcaagtcttctttcttacgcaacaccaaccagaggataaacacaatgatataggatgctgcaacagtgacatatttttccgtatcactgataacagtgttgcgcggcaggaaataagctgccgtagcactcacatagataagcagagcaatcgtgatgcttgtagattttttaaatctcttcattaccaaagttttttagtcgttttaaaataccagatactaaaccagagcgcagctaccacagcagccagaatggcaacaccgagggcagtctgaggtcctaagccaaagccttcgggggctatacagatgtatgttatacaaacagttgtcataaatacagccggaacataagttacataaaagtaatgccctttcttttcacgtaccagatagacggtaatcgcccaaagcgtaaagacggaaagcgtctgattggtccatgcaaagtaacgccaaatcatgtcaaaaccctctttgtcgctcaaactgtagagcaacaaaccgatagcagcgagaaacataggaatacatatatacaaacgacgacgcatggatttttgttccattccgaggaagtctgccacaataaggcgggcagagcggaaagcggtgtcaccactcgtgataggcgcggcaatcacacctaatatagcaaggaatcctcccacagtaccgagccaatctttggtgatagcatccactactacggcagcattcgtctcccccattccgttttcatgaaagaaataggtggcagctgccgcccaaatcagggcaacaataccttcggtaatcatagcaccatagaacacagggcgaccgtgacgttcactcgtcatacaacgagccattaacggactttgcgtagcatggaaaccactgatagcaccacaggctatgctgacaaacataatcgggaaaatgggtagttcaacagcattagggttcgtattctgtaatccgtcccagaattccggtaagacaggatgcttcacataaagcatcaccagtatacccaccgccataaaaagcaatgcaacagcaaaaagcggatatatcttacctatgattttatcaaccggcaacaaagtggcaaaaatataatagataaatactactattatccagaacgtaacatccaaagattccggtgtcagttttgccagcaatccggcagggccggccacaaagacagctcctaccaatatcatcaaaagaactgtaaaaccgcgcatcacctgcttggtagttactcccagatagcgaccgatgatctccggcaagctttcaccgccattacgcagagagagcatacctgccaggtaatcatgtacggctccggcaaagatactgccgagcacaatccacaaataagatgatacaccaaatttagcccccataatagcaccgaagataggacccaaaccggcaatattaagaaattgtatcatgaaaatcttccaggtgggcaaagggatataatccaccccatcggtcttagtcaaagcaggcgtcttacgatcgtcagggccgaaaatatgttcgatgaaacgcccgtaaagaaaataacctgctattaatgccaacaggcaaagcgtaaatgtaatcatggtgcgttattcattatttttaatggacgcaaatgtaatagtttctaaggaaactgcacaacattctcaagtgttttacttatcttcgccgctaaaaatgacagaaataaagaaggaaaagagaatttgtttagaataagtattaggtattacaataaaatctctatcaacatgaaacagttacttctcactatattatttatcacattcgttctgccccttaccgcgcaatccgccggtgagatggttacccgtcctccaaaatacgaagtgcgcgctgcctgggtcaccgccgtctatggtttggactggccccgtacccgtgccaccagtcccgaaggcatccgaaaacaaaaggcagaactagtcgagatacttgaccgactgaaagatgccaacttcaacactgtgctcttccagacgcgaacgcgcggtgacgtgctctaccgctcgaagatagaaccgttcaactccatcttgactgggaaaacagctgcagatccgggatacgatccactggcttttgccatagaagagtgtcataagcgcggtatggagtgccatgcctggatggtagccattccgttaggcaatcgcaagcatgttgccaatctgggcaatgcctccgtaaccaaacagaaatccgctatttgtgtgccttataagcgtgaatacttcctcaatcccggaaatccggcaaccaaagaatatctgatgagccttgtacgcgaggttgtggaaaaatatgacgtggatggcgtccacttcgattatctgcgttatccggagaatgctccccgattcccagacacctatgatttccggaaatatggcaaaggacgcgacctcgcccaatggcgcagggataacattacggaaatcgtccgacacctctacaaaggtgtgaaagctctgaagccctgggtaaaggtaagtacctgccctgtaggaaaataccgtgatacctctcgttatccttcccgcggatggaatgcttttcatactgtttaccaagatgcacaaggttggttgggtgaaggcatacaggatcagatatatcccatgctttacttccggggtaaccatttctatccttttgctctcgactggcaggaacaaagtaatggtcgccagatcattcccggactgggtatctatttcctcgatcccagtgaaggaaactggacactggatgaagtggagcgtcagatgcacttcatccgtacccacaaactggcaggtcaggcccattatcgtgtgaaatatctgatggacaacacacaagggttgtatgatgtattggaagaggacttttataccgctcctgccctgcaacctgccatgccctggatagacaacgtgccaccgacagcccctacccatcttactgtcactcgactgccggacggatacatccacctcagttggatgcccgccacggacaacgacaaacgtaatgtaccgacctacgtcatctacggctcggacacttacccggtggatacctccaatccggaaaatattattgcccagcgagtacaaggaacggaatacacgtatgctcccgtccgcttctggacggcaaagaagtattttgctatcactgccgtggaccgttgtggcaatgaaagcgaagcgggcagatgaccctcccgaatgccacacttcagcgtccccaatgccacacttgaatgggtgaaacgccacacttgaacaagtgtgaagtgcggcattggggacgctgaagtgtagcaccggaagcggtgaagtgtgacattgcgaacgctgaactgtggcaaccgtacagcaagccgcggcatccgtacgacgagactcgacattggaaaaatcagcagcagcagcgtttctttctttttcttctgctgctgttgttagtatatcttttatattctctttattatccgtatcaacactttcactaataatactatcattcagcgttttatctgattttccggtgcgtttttccgccttttccctcgacgttttttgtcgtttttcgtcattttttgaccaggaaaccgacgattccgatacatttccggtcgttttcggaaccgtttttcgaaccgaatcttccggttttcccgttttatccgcaactgtttcctcccgcttttgaaccggtttatgcagtgggttcagttcggcaggcgcaaaagatccgtcctcttcaaaatcaaaaagctcgtaaccgagaatgatcttcttgacataagcaaaagatatcttatgcatcttgcagtaaggacgcaaaaactccatatcgacacatgagccgggcaacatagccaatttctcgataacgaaccaataagcccctgttcccttgagcttttccattttcaacagatattgcattctgggatcgtgcatagccatcagcggatgctgcaaatagaaattccttttcatctttctttatgttttagtttaaagccataaagataagaatagcatgtgagacagtcggaggttacgtgaggttccgtgaggttaaatgaggttccgtgaggttaacgcacctccacccgcacgtaagcccggtacctgctttgaggagtaaccggcaccaaggccagatagccggagacgattcttccttcctccactatcaatggataatccctcatgtcctgttcatgttgcgtccgcaaagcctcggcagaagggaaattgtcgacattaaaaattcctttgctaccgggagcgacgaaattatcataaagctgacgggcaaccatccccatagtcatgcgcacattaatttcaacatgtggataaatggcgtacggatatcctctctgatccggacagatcatcatatctatccccataggaccggaataatacctaccataaattccttctataactttctgcaaatactcacgaatgcacacaaaggcttctaaagggatataccgtagaatccactgttccacttcttcattagaaaccagcatattaccacgataaacacctttctcatccgtaataaaatgcgagtagccgctaaacagtaccttccccctaccgttggagtagaattccatggcaaaatccccctcctttttatatataggttccagtataagagccccgtggttcaccagttcccgacgacaccaatcagccgtagatttcgtcagcccacggcgacaccaacgtaacccctttccgctgcccgaccacacggacttgaacaggtagccgtccttaaaatcatcgactatatccggaacgcagaattccttgccctcccctgatatcagaaaatgacgtccacaaacacatttgagggttttattcagttcaaacgtcatagcaagagccatcccatacgcacgggaagaaagcatacgacactcgcgcaactctgcttccgtaggaagtttatgttgggcaataccggccttctgcatacgcttgcggaaagcgcgattccatccccaaggtacaatttgggattccgcataatcgggtaattccggttcagtgaccaattgcacggaaagggggaacaattgtttcattttttgcaggtaatcagcgttataggccgaaggagcaagtaccgcactgccgggttgggcataccaaacgggtaataaagcaagatcttgggccatgcgacaggcagaagcgggagccatataattttcttcattattagcaagtgccatgtccgtgtctgggttaaatacatagagtttcatactattacagttctttattatttaaggccgcaaaattacagagaaaaacaaggtaaagcaaatatataaacttcactaacaaaaaagatattttgccatctctactttgcaattctataaaaaagacgtatatttgtcgcccgataaactgaatttaacagcatggaagcattctaccgcacacacgcctatcttgttgagcataccaatgcccccgttcgccgtgatctcatggatgagatcaactggaacgaccgtcttatcggtattaaaggaacgcgtggtgtaggtaaaaccacatttctgttgcaatatgctaaagagaaattcggcactgaccgttcctgcctctttatcaatatgaacaatttctacttttcttatttcagcatcgttgatttcgcttatgaattccaacgccgcggcggaaaagtattgctgatagaccaggtattcaaacatccggactggagcagggaactgagaatgtgctacgaccgctttccaaacctcaaaatcgtgtttaccggttcgtccgtgatgcgactgaaagaggaaaacctggaactgcgcgatatagtgaagagttataacctgcgtggcttctccttccgtgagtatctgaacctgcaaacaggcatgaagttccgtgcttatacactggaagagattttgagcaaccacgaacagattgccaaaggcatcctttcgaaggtacgcccactggattacttgcaggactatctgcaccatggtttctatccgttctttctggagaaacgcaatttctcggagaatctactgaagaccatgaatatgatggtagaagtggacatcctgcttatcaaacagattgaactgaaatatctttcaaaaatcaagaaattgctttatatgctggcagtagacggtccgaaagccccgaacgtaagccagttggcaaacgacatacaaacatcccgtgccacggtgatgaactacatcaaatatttggcagatgcacgccttatcaatatggtatatccgaagggagaagaattccccaagaaaccatcgaagattatgatgcacaactccaacctgatgtactccatctatcccgtgaaagtggaagaactagatgtgctggacactttcttcgcaaattccctgtggaaagatcacaaggtgaacaaaggcgacaagaatatgtcattcctggtggacgatgtgatgcctttcaagatttgtccggaaggtatgaaaataaaaaataatcccggcgtcacctatgccctgcacaaagcggaaataggaagggggaatcagattccactctggatgttcggctttttatattgagatttattcacttaataataattcaatttagttatgactaaacagaagaaattcattacttgtgatggtaaccaggctgctgcgcatatctcgtatatgttctctgaagtagctgctatctatcccatcactccctcttctacgatggctgagtacgtagacgaatgggctgccgcaggacgcaaaaacatcttcggcgaaacagtattggtacaggaaatgcaatcggaagccggtgctgccggagccgttcacggttcattgcaagccggtgcgttgacttcaacgtacactgcatctcaaggtctgttgctgatgatcccgaatatgtacaagattgccggtgaattcctgccttgcgtattccacgtatcagcccgcacactggcttctcacgcgctgtgtatcttcggtgaccaccaggatgttatgtcaacccgtatgacaggtttcgccatgttggcagaaggttctgtacaggaagttatggacctctccggtgttgctcacttgtcaacgatcaaagctcgtgtaccgttcgttaatttcttcgacggcttccgtacttctcacgaaatccagaagatcgagatgttggaaaacgacgatctcgctccgctgattgaccaaaaagctctggctgaattccgtgctcgcgcattgaatccgatgaatccggttgcccgtggtatggctgaaaaccccgaccacttcttccagcaccgtgaatcatgcaacaactactacgaagcagttcctgctattgtagaagaatacatgaatgaaatttctaaaatcacaggacgtaaatatggattgttcgattactatggtgctgaagacgcagaacgcgtaatcatcgctatgggttctgtaaccgaagctgcccgtgaagctatcgaccacctgatggctaatggcgaaaaggtaggtatggttgccgtacacctgtatcgtccattctccgctaagcacttcctggctgctgtgcctaagactgctaagactattgcagttcttgaccgtacgaaggaaccgggtgcgaacggcgaaccgttgtacctcgatgttaaagactgctattatggtgcagctgatgctccggtaatcgtaggcggtcgttacggtttgggttctaaggacactactcctgctcagatcattgccgtattcaagaatctggctatgccgatgccgaaaaaccacttcactatcggtatcgtagacgacgtaaccttcacttcacttcctcaggaagaagaaatcgcattgggcggtgcaggtatgttcgaagctaaattctacggactgggtgctgacggtacagtaggtgctaacaagaactctgtgaaaatcatcggtgacaataccgacaaacactgccaggcttacttctcttacgactcaaagaagtcaggtggtttcacttgttctcacttacgtttcggtgatactccgatccgttctacatacttggtaaacactccgaactttgtggcttgccacgttcaggcttacctgcacatgtatgatgtaacccgcggtttgcgcaagaacggtacattcctgctgaatacaatctgggaaggcgaagaactggccaagaacctgcctacccgtgtgaagaagtatttcgctaagaacaatatctctgtatactatatcaacgcaactcagattgcacaggaaatcggtttgggtaaccgtaccaatacaatcctgcaatctgcattcttccgtatcacaggtgtaatccctgttgacctggctgtagaacagatgaagaaatttatccagaagtcttacggcaagaagggtgaagatatcgtaaacaagaactatgctgccgttgaccgtggtggtgaatacaagcaattgaccgttgatcctgcttgggttaacctggctgacgacgctaagactgaaaacaacgatcctgcattcattaacgaagtagttcgtccgatcaatgcacaagatggtgacttgctgccggtatctgcatttaagggcatcgaagatggtacttggtatcaaggtacagctaaatacgaaaaacgtggtgtagctgctttcgttcccgaatggaatgctgaaaattgtatccagtgtaacaagtgtgcttatgtttgtcctcacgcttctatccgtccgttcgttctggatgctgaagagcagaagggtgcaaacttcgagatgctgaaagctgtaggtaaagtattcgacggtatgacattccgtatccaggttgatgttctcgactgtctgggttgcggtaactgtgccgatatctgtccgggtaatccgaagaagggtggcaaggctttgactatgaaacatctggaaagccagttgaaccaagttcctaactgggattactgtgctgaaaaggtagcaagcaagcaacatctggttgatgttaaagctaacgtaaagaactctcagttcgctactcctttgtttgaattctcaggcgcttgctccggttgtggtgaaactccgtacgtgaagttgatcactcagttgttcggtgaccgcgaaatggtagccaatgcaacaggatgttcttctatctactccggttcagtaccttctactccttatactaagaacgaaaagggtcaaggtcctgcttgggcaaactctttgttcgaagacttctgcgaattcggtttgggtatggaactcgctaatgaaaagatgcgtgaccgtatcgtgaaactgttcaaccagattctggaaggtgacaatgctcctgctgaggctaaggaagtattgaaagcatggattgaaaacatgtacgacgcagacaagactaaagaacttgcacctcagatcgaggctatcatcgagcaaggcatcgctgccggctgcccggttagcaaggaactgaaaggcttgactcaatatttagtaaaacgcagccagtggatcatcggtggtgacggtgcttcttacgatatcggttacggtggtctcgaccatgtaatcgccagcggtaaggacgttaacatcctggttttggatactgaggtttactctaacacaggtggtcagtcttctaaggctactccggtgggtgctatcgctaagtttgccgctgccggtaagcgtgtacgtaagaaagaccttggtttgatggctactacttacggttacgtttacgtagctcagatcgctatgggtgctgaccaggctcagactctgaaagcaatccgtgaagctgaagcttatcccggaccgtcactcatcatcgcttacgctccgtgtatcaaccacggtctaaagctgggtatgggcaagagccaagctgaggaagaaaaggctgttaagtgcggttactggcacttgtggcgttacaacccggctttggaagctgaaggcaagaatccgttccagctggatagcaaagaaccggattggtctggattccaggacttcctgaagagcgaggttcgttactcttctgtaatgaaacaatatccttcagaagctgctgaactgttccaagctgccgaagacaatgccaagtggcgttataacagctacaagcgtctgtctaaaggaaactggggtgctgatgccgaataatttcgattattaaaatagtaaataataaactctgaaaaatgaaggctgcaccgtgaaccggatgcagcctttatttgttttcaaacaaaagcaacgaacattatgattggatttattatttggattataggcctgatacttgctatcaaagccgtattggaaattatgcaatggaaggtagatggcgtcaagaaactattggtcgctattcttgtattgctcaccagttggatcggactgatcttttattatttctggggaagagacaatttaccttcaatgttgaaataaacagatctatctgtataaaaaaagaaaatgccgtacttaaattacggcattttctttttttattaagctatgtacgtcttcctccgttccaccgaacggaccgtagctctgtagtttgacggaacacatggcagcggcaaaacaaccggcttcctgataagatgctcctcttttacgcatatacagatagcccgccatatacgtatccccacaaccggtagcatcggcaacattctctaccggatatgccggaatttcatagaatcgttcatcaacataaataagtgagcctttgtctcccaaagtcagcaagacttccttcactccccagtccgccaatttaacagcagcatcataaggatctgaacattgcgtaagtacctccatttcgtgttcattagctttcaagatatggatatatttcaaggcttcttctttttcagcccagtccaccgccaatacttcttcgttctgcacttcacgcaaataaccctgtacatcaagagaaagtaatcctttcccggcaagatatttgataacatccagtgaaaaatcatccgccagtaaactacccaaatgaaaaatccgggcatttacatcctgcaaaccttcaatcgtaaaaggatcagctttagcagtaacccgctgctttctttcattggtatcctcgccataaatattctcaaagcagatggaatggatgctggggagtactttcacttcaataccgtctgtcctcaaatcatccaccaccggcatctcgctatcagccaaggcggtgacaagttggaatccttccgtactcaggtgtttgatggcatgcgcaaaatagaaagaggttcctccgggcatgtgcacagttttctgcggagtaactactttatccaaagtaatatatccgatacaacaaagatcgtatttcataaaatattcagttccatttttcagactgcaaaaatagccaataattatcgtttcttccccctgcaacgctataaattcttccgttttaagaaatccgtcggactttcaccgaattgttccttataacacttcgtgaaataagacggagacgagaaaccgacttcataagcaatttccgcaaccgtcatttctgaagaagccaacagggaaattgcttttttaaggcgtgcctggcgcagcaattcattgggagcataattagtaagtgatttcagtttacggtagagttgcacacggctcagtcccatatctttgcctaagtcttccacattcagttccggatctctcattttctcctctaccagagatttaaaacgagagacaaaatctttatcaatatcacagatattctctttcgccaatgtctgattatcaccgaagaactggcgaagctgccgacgggaatctatcagattccggatacgggacagtaacaactgagaattgaaaggcttggatatataagagtcagcaccaccattatacccctgaatgcgttgttcatcaagtgaacatgctgtaagaagaatcacgggaatgtggcaagtctgcaattcggttttcaacctccggcaacactctatcccgtccataccaggcatcatgacgtcggaaataatcacatcgggaacatatttcattgcgagacgaatccctgtagcagcttccgatgcatccagcacatgatattcttcagcaagtagtgtttttacgtaattgcgaatatcggcattatcgtcaataaccagcactgtcgggcgatctgcagttttcgtgtcttcctcatccaagggcaaatctgtttctatcaatgtagcagagacttccgcttcctcagtgggaagagtaacaaccgtaggatgatacagagaaacactctgcgccggaaaaagaacggtaaaagtcgctcctttttcattgctatgggcagtgatctgtccgccatgcatctctacgaaggcacggacaagcgctaatccgatacctgtaccggcctgatgtccgtctatctggtagaagcgttcaaagatagcatccacctcttttggggaaatatggctacctgagttaaatacagagaaacggtaattagtcgtttccgcctccagcttaaccactatttttccattctcgggtgtatatttcacagcattggatagcaaattgaaatagatacgttccatcttctcactatctgccatcatgcggaaatctgtgtcaggtgtaacttcaaaagaaaaggagatatgctttttcagcaacgccatacggaaagaatcattccagccgtggaaactacttaaaagatcgaatggttccaaatgaagttccatccgcccgttctctaccttacggaaatcaagaatttgattaacaagacgaagaaggatgttagcgttcttcttcatcagttccagtagttgatgcggatgctctccaagagacttatcggcaagaagctggttgataggatctgctatcaatgtcaacggagtacggaagtcgtgagaaacattcgtaaagaataccagtttggcatgggtggcctcttccagttcgcgggaaagctgttccaactgttctttctgctgaatgagcagctccttctgctgtgttaattgttgcttctgttcctctaacttctccttctgccgggacagttcacgattcaggcggtttttggtacgcaaagaaagataaacggcaaccagtaaaccgattaccaataaaagcaccaataagctgccatataatatgacttgctgcgtagcgtaacgatcaaggaactgactcatctttccattcatcgtttctatcttttcatcaagggtagcaatatgcgaggtctgcatctgcataatctgcgcattggtagcatctacaacagaagtactcaatatggtttcacgaggaaagtcccgcttattcaggatatccatcgccatctgtatcacacggtcaccaccggtaggataaataaacgtggcatccagttgaccattcagcacttgttctacgccatacccttcaccgggcaaagcatccgtaccgataaagcgcatttcttctgccctaccctgccgctcagcaacatcataagctcctgccgccattcggtcgttctgtgcatacactacatctatttcaggaaaacgcgccaaaagagtatccatcttctctcctgcctcagagcgcagccagccggcatcttcacgtgccagaagctgaatgccgggataaggagatatggcggcaacaaatccctgatgacggtccatggccggtgtagaacctgtcaaaccggctatctccacaatgttgccttgtccatgaagcatattagcaacatagttacctattgcttttcctaactcatagttgtcagcacctatataagcggtatatttatcagaaagtatcttgcggtcgaaaacaatgacgggaattcccctgtcgaaggcttcctccactaccggagtgataggtgcagcttcattgggtgcaactacaagcaagtccactccttctttgatgaaattacggatatcttttatctgttctgcattatcatcttttaccgtacgaatatcaatttctactccgtcatagaaaagtgcctcgcgcaacatttcattgttcatctgatgtcgccattcatcatcgctgcactgggaaactccaatacggaaacgtgcttcgcgatgggtgcacgaagtggtcaacccaaaccaggaaagtgaaacaagtaataattggatagtatatcttctcatcttttccgttattagtaacgcaaatataaaaatattatcataggtatcgttatctgtttcttaaaaaaactccctattccaccgatttttaactcggacagaatagggagactactattgccggaaagaaggacagacaaaccagataaggctattattgagctgtaagctcaataacatggctctgagtcgctgcaaaaccaaatacattcaaaccaactttcatcagataatcaccggaataaactttcccgctagattctaatttagattcagtagagggcatcaaattgatttcttccactttatattgcttgttcgggtttaatccctgaagtttgactgtcatcagtttctcctggaaacgcggatggatatcataagcaaacaatacagctttgtttgcatccttgcttacataattcagtgccatgtgattgccctcatacggagacaccaaacgatattgatcaccatccataatggcactttgcagacgcttccagttggcaacagccgtctggcagtaagtcaattcatcagccgtgagttctttcagacctatatcaaaaccaagcttacacatagaagctacatccgtacggaattttacagaagtcgctttattccaactggtcacatgggcatccatagctttcgcagggaagaactgggaaaagccccactggatataaatacgttctacaggatccgtattgtcgctgcaccagaactctgtgaaatatttaagcgcttcgtagtcgcaacgggcaccaccaccggaacaaagcatcatcgggacatcaggataattcgctttcacacgcttcagaacattatagatgccacggacatgatcaatatacaactgtccctgtttgttcttcagatacggagaatagatattggtgataggactgttgcaatcccatttgaagaaagcaacttcgggattctccttcattatattctctacaacaccatacacataatcctgcaccttcggattgctaaggtcaagtaccaattggttacggtaataatatgtttcacgattaggcagtgtgatcgcccagtccggatgtttctcgaagagttcgctcttgggattcaccatttctggttcaatccagataccgaacttcacatctgcatccttggcagctttcaccagcgccggaataccaccgggcaatttatcgtgattcacatcccagtctcccaaacccgcatgatcattcttacggggatatttgttcgcaaaccaaccatcgtccaacaagaacatatctacacccagatgcttggcttccttcattaactcggccagtatctcctgattaaagttaaaacctgtattttcccagttattcaggagagtcagacgactccctttaccatctttcaagctgtagttgcgtgcccactcatgaaggttacgacttcctttcccggcaccgtcattacttaaagtaaatatgaattcgggagtggtaaacacttcattcggtttcagttcataattcgaagcgtaaggattaataccgggaatcacacgaagattcccaacattgtccacttcaaacatgaagcggaaattaccggtccatcccaacgtacccatcaatacatttccctgatgttcgctgaccggctgatccaaccctacttcaaagaaaggatgcgtatgcatggcagcacgacttcccaacttcgtatcaattactttcttgccaaattgcaattgctggctgctcatttgcgcttcctttgcccagtcactactgaactcagtcaggtaataagcggaattattgaaataaagcatggcagaggcgtatgtagaaagcaggacaggtttcttttcctgatgcttgatttcactccaagtcttgataacattttctttcggataagccacatagtgcagagtgacgtctaccggatactgatcgtcacggagattaaccacagtttccgtaccaccctcaaccgccttggaggaggaagaaacataatacaacatagtggacggattgccatcattgtgagtgatagcgatagccggttcaaagtaatcttcattacccgaaccaccatacacttcccaaccgcgtttacttacactaccatcggcaccggcatggatattccactgaaagttattcaaatcctgctcatgcagcagtttttcacctaagtaagtttgatacagacggccgttgtcgcctacctgaagcaccaggtcggtgttatccgtagaaatacggatcgttttgttttccgctgcattggcatacgacaatgtagcacatgcaaagagagttacaagtaaatttttcatggtgtacaatgaatttagttacaaaaatatattaaattaatttagaatgaaaggcttgcactgaattccagtgtaaatggacgcaagtaattaccactcatataatgatctttgaatttacctgcttcttccttgcccagtagttcggcgccgctgatagttccgcttgcacccttttggttcaagaagttcactaccgttgcccccagtgagaggtgcttattcactttccagttcacaccaccgaaggtttcccaacgaccgttgaaatagagggcattagtcagattggcatacgtcttcccgaaataacggaaactgagccacaagcgcagatcgggagttatgttataactgggatctatttcagccagtatctgcggaatttctttcactatgttgccattagcattcaagtcaggcactccttcaaacggagatttgataaagtaattgttataaatcggtttctgataagtaaacagggcatgcagatggaaacctttgaaaggattgatttcagcggaagtggtccaacccaatgtcttaatatcgtaaatcagcaaggtcgtcttggactgcgttgttcccggtttggttacattctgctggtctatattattcgacttggaaatataagtaatcatggaagtcaggtttatccagtcattctgataaaataatccgccacgcagcaaagggatagtcacacgcttatattgctcttcggtaggtcctgttccggcatattcattgatacgtgggaagcgggtggcgacggttccgtcggcagtcagcccgaagttcttggtcaacttataagtaaattgtgccgttgcagcatagttcagcttatcttttactactttctgcggctgtatcttttcagtagaaagtatattcccttgattgtccgtatattcgtgagtatcaccgatgtggaagccggaatagcgaccataaggaatctgatcggcagacatacggtaatattccagacgggcaccataatagacagtgaatttcggacttacctgccagttatccgtaaagtaggcagccagtttgttttcggtccctttggtatattccggactcagctcattgaaaccactgaatttagcagtagtcccgtcagctaccacacaattcagtatctgcggatattcagtaaccgtgcctacccattgaaaagaagaagagtgataatccaaatgataaaaccattcattcagccccaggcgtacgtcatggtcgcctatcttctttttcagttcggaagtaagcaatgcattcttcactttgccaagatgcaaccaagtacgcctgccttcgaccaatccggtataggcatcctccgaaccatccagaaaaaggccgtccgccaccgtggctttgttgatattgctaccaccaaagtccacatagttagcttcgggagcattcataaacttggcattcagcgtccagttcagattgttacggaaggtataatcaaacagcatagctacttcatgtgccttattgcctgtaaagtcaccaaaccgaccgctcttcatctttccgtccatcacatccatgtactgaaaacgtccaccttcgggagcatacgaagaagttcctaacttgaagccaggaatttctttcacactgccatctcccacatagataaacggagcagcgttaatcatcgaacccaatgcactgctttttgagaacttatagataactgagaaccttccgcgattattgttgaaaaggcgcgtcagccctgcatgataaagttgggtacggtcactgaagttttcaaacttaggagagaaactacccggatcgaagttctgatagatgctggctgtatagagccagcggtttccgatgccaccggacacattcatgtctatattttgccacccaaaatggttggtgcggtaattcaagactcctttgaactccttttgccccaatttggagaaagaatttacggaataagcgatgtttccggtagcaatagcagattcagacggtgtcatcagccctacttcgcccaggctggcatcgctgcgccagtgagtagccagcttatgcacagccgaagaatagacagcgggtaatccgttttcatacacatttacatcttcactgggaagtccgatctgaatttcacggggcttgtttgcatccgaagcattcagcatcacattgcgttcgctgatctccgcttttttactactgatagtgtcattctctaccggtttgctcgctgttgcaatagtagcgaatgataaggctgccgatatgacataagaaaagagacttgctttcatactattaatggatttaaaattaaactttcggttcaaggcatcagataagaaatattccccttatctttcaacgagggcaaagttaacaggtataataatgcccggtttccgcaagtagccatcaggtagattggcgtgagagtatcatctacaatacagcactgataacaagctatttacatcattccgttttataaaagcaagtagacatacccgtttaccggaaagttttaatatctttgtatttgtctacttttaatgaacataccctatgaaaaaatacttgttatcggtattattcctgttgttcgtgtttgtcccttttcgtgcggcgaataagactgacttatccaatgagttggaatcagctttaaaactgcgcaaccaatactcactccgaaaagaagcccgaattgacagtttaaaacgtttgctatatccatccatggacgacaatgaacgtttccgattatacaatgctatttacgaagagtactatacttaccgtttcgattcagccatgctctatgtagacaaggaagaacaggtggctatgacactatctcaccccgcttatcgcaacctgagcatcattcaccgctcggtgcttctttccacatcgggttatttcagcgaatccatccagaatctggaacaaatagattcacgtacattgaatgatgcgacacggatagaatattacgccgcctatgaatgggcttacagtatgtgggcggaatattccaacgataaggtttatgctccccgttattatgaaaaagaaatgctttatcaggattcattgatcagtgtacttcccactggctcgtcactatacaattactggaaaggagaaaatctatatcgtcaccagcggtacgccgaagcggaaaagtattatcaaaaggcactggaaggcgttccagtgaatgttcgattgtatgctatggttacgtatggtttagcattggtctattcaaaacttggtgactggaacgaatatgagcattatctgatcaaggccgccatatcggatcaggtatgcccgcttaaagaaaatctagccttacaggaactggccctgtatatctttaaaaaccgaagtggggaagtatcccgtgccaatcgctatctgaactactccatggaagacgctcagttttataataaccggctccgcatgctcgaaatagcgaaaaaattcccttctattgtactgtcttatcaggaacagaatcttatcaagagcagacgactgcaatggtcactgatatgcatcagtatattgtccatcggactggtcgtctccctgatctatatttatcggcaaatgcatcaactccgtaaacgcaggaagatactggcggacatgaatcaggaactgcaacatctgaataaggcattagtaaatacaaatcatacgcgtgaagaatatgtaagcctgttcatggacctgtgtgccgcctatatagacaagctgaataaatatcaggatttggtaaagagaaaagtgaaagcaaagcagacagatgatctattgaagttagtcaatgccaccaaactgtcagatacagatgcgaaagagttcttcgtaaacttcgatacggcatttttgaatttataccctaaatttatagaagaatttaatgcactattgcgggagggtgaagaaatcatacctaaaagaggagaaatactgaatacagaacttcggatatttgcattgatacgtatggggattcaagatagttccaggatagctaccctcttgttctactcaccacaaacaatttataatcatcggagtgtagtgaagaataaggcaaagatgagggatagctttgaaaagcaggtggaggagctttgtgcagtgatgtagattcacttacattataaaataagacactttttcttaagaaaagaatgtgtatccattgccctttcaaatacttctgttacttttgtcgacagctacaagataactactagaaaaactattatattatgaaaaatctattctattttatcatttcgatatgcacgttatatgcatgttcctcggattctgatttcaacccggaagatgaaaatcccacttcttctgatttttatgaacttaaagctattcctgacaagaaagtcattttcaaagcctatccggcaaatatgaaacaaattcttggcgcaggctacgatgttactgccgaccatttaagtcccgaagccataaaagctcccataatagatttggaaaaattggaaaacagcgatgaagattatatctatcgtatgaaagccacttcttccgaacccagagactacgccggagaaaatgcaacaacattcctgactgatattaccaatagcctgatattgggagacataaattccagaaatgctctatcggtcggtaccattctcaagcataaagagttcgagtctgattacaaccattcttcacaatattcttttgcctccagcgaacaactatttacagcggagcgttggtacttttcgtttttctataccttagagaaatataaatacagataccttacgcaggaatttgaaaatgatgtaaccagtctggcagcagaagatatcataaacaaatatggcacacaccttttagtggatgtcggtataggagcacgattcagaggactttaccggacagcagtacctacagcgacatcagctgccagcaccgcaaaaatcaccttactcagcgctttagaaaaaataggccagcaaggtctctttaccggaagcggtgccggcggatggaaagaagaagtggcacaaagcataggaggtcagcttatactggaattctatggaggaaatacaagcttattgacttcacaaccgataaccgatggctttaatgcctggtggaactcgttcaatgaagagaattatactttgacgaaaatcactcaaaataaagtccttcctatttatgaactaatagcggatgccaccaaaaaagagcaagtgaaagatgcgatagaaaaatatatatccaaccaaaagttatcgttagtttctaccactccgttacttcaggcctggaatggcaaaaatcacacatacgacacatcttacttaggtattgcaatgcactccaacaaaaaatatgaaggagccatctgttccatctacaaacaacaaatcacgagtaccgtaccgttgtatttatacagtaacggaaaaaagcaacgtctatctgtagagctattgccagccgataccgaatggcaactggaaaaagaattaggatatgtatacgcttcgcccgtagaaggagccatcccgctatacgaagccgaaaataagaacgattattgttatactacagaagacaagcaggaatatggcacaaaagggagttggaagcaaaaagaggttgtgtcaaaatgctggcacaccctctttttatgcgcaaagcccagactttctcaagcccgggctttgttattacccaaaatttttgtaactttaggcataaagtttttcgttatggcaaagttacattttcgtccttacattcccaaccaaaccgttctttttccacaaagaattgatgaaaacatagctgcggacgatcctgtccgcatagtcaatgcagttgttgataatcttaatcttgataatttcaagaagctttataaagaagcggggcgctcagcttatcatcctaaaatgatgcttaaggtaattatctacgcttacatgaataatatctattcctgccgtaaaatagagaagcttcttttgcgtgatatccattatatctggcttgccggtcatgagcatccggatttcataaccatcaaccgtttccgtaaccgtgtaaaggaggagataaacaacgtcttcacgcagttggttcttgtcctagctgacaagggtttcatcagtcttgacgtagagtatatcgacggcaccaagattgagtccaaggccaacaaatatacttttgtctggcgcaaaacagtcgaaaagaaccgtacaaggttgctgaataagattcgcatccttctggagcaggtggatgaagccattgtgcaggagaactctgtaaaagacacatccgtggagttgactcccgccatgctctctaatatagtggatgaactcaaagaagtgctggaacaacagcctgcaacacaggacaaggaacaaaagaaagctctgcgtgaaaaaaagaaacaggtcagagaacttgaagggtatcgtgacaagctgatggaatacgacaatcaccttgaagtccttggagaacgtaattcctattccaagaccgatcctgatgccacattcatgcgtatgaaagaagacgccatgaagaacgggcagaccaagcccgggtataatttacaaacaggcactgaaaaccagttcatcatagacttccggctgtttcccaaccccaccgatacgctgaccctgatccctttcttccactccttccagcaccgctataaccgcttaccgggtatcggtgtggcagactccggttacggctcggaagaaaattaccggttcatgcaggaaaacgggatagaggcctttgtcaagtacaactacttccataaagagcagcgtccccgttatactcccaacccgttccatgcggaaagtctccattacaatgcgggggaggattattacgtttgtacgatggggcaacacatgaaccgcataggaaccagacgtgacaaaacagcgagcggatacatcaccgaaagtgcccggtacaaagcacaaagatgcgaaggctgtcctttgcgtggaagttgttttaaagcacaggggaaccgtattatagaagtcaaccaccggttaaaccaatataaacggcaggcacgggaaaggttactctcagaagaaggaatcaggcatagaggcaggcggtgtatagaaccggaagctgttttcggacaaatgaaatacaacatggcatacaggaggttccggcatgtgggagaagacaaggtgacaatggactttgccttctttgccatagcttttaatatcaaaaagatgtgtgcaagactgagaaaagcaggaaaggagttcattacacttgctaaatctatatttattgggctatttataactcgatacaacgggaatatagcaacttgttaccaaatgaatgagaaaaaagcggcgtagacaaaaggaaatatagcaggactgtaaatcatcaaaaaaggttgtgccaacgttttgacacaacctccctataatataagattgcctgccaagttgaagcaattatcaggataggttcaactcatacaccggagatatcagctgctcccaaccgactcttaaaagcagacggcaattccggcatggccccactctgtgtacaaacataggcggagacttccactgccagtttatgcgcttcgggaacaggtttcccactaagtatagccgatgtaaaagcagcagtaaaagaatcacctgcccccacagtatcggcaacaggaactttcggtgtatcctgataagatactacacccggagtaaatacataactgccattggttccacaagtcagaatcagcatcttcagattatatttagccaaaagtatccagcatttatcctgtaaatcaatacccggataaccgaagatacggctgatagtaaccagttcctcatcatttattttaagtatgttgcagcggcgcatagattcgcagagtatttctttcgtatagaatccctgacgaagattgatatcgaaaatcttgatctgatcttctccatcaggcatggtgtccagaaaacgttgaatagtagcacgactcacgggactgcgctgagccagcgaaccgaaacaaacagcacgggtggaaagggccagacgtttcaaatcatccgtaaaaggaatgttatcccaagctaccccctctttaatctcataacagggaacccccacagcatcaagagtaacctgtaccgtaccggtaggataatccacttgctcgatctcacaagtcagtttcttttgggcaaaaacatccaatatttcctgtccgtcagcatcacatcccactgcactcactacacgactatcaaaaccaaactgtgatacatgataagcgaaattggcaggcgcaccacctattttctttccttcgggcagcacatcccagagtgcttcacccattcctacgatgattttattcatgacactaaatttaattacaaattataaattacaattagacattaggttatttctttatcttcaaagtatagtacagcaaataaagtactccgacagtcatcacggctactgcaccgctctgtcctacggcatcacttgccaatcccattgccaacggaaaaacagttccaccaaaaagtcccattatcatcagaccggaaacttcattcttcttgccgggcatatacagcaacgcctgtgagaagacaatcgaaaagatattcgagtttccgtaacctatcagcgcaatgcaaatataaatagatgtttttgaatggaaagcaaaaagtccaatcattgccagtaacatcataaaactactgatagcaaagaacgatttagcattcatcctcctcaaaataaaagaacctgtgaagcaacctgccgtacggaaaatgaagtagagactggtagcaaacgcagcgtcatccaatcccatccccaaacgctccattagaatcttaggagcagtagtattcgtacctacatcgattcctacatggcacatgataccgatgaaagaaagcaaaacaaacggtttacccaataaagccaaacactcaccgaacgtagaaggttttccttcctctttctcctcggcaatctgtgtctgtcccaacaataaaacggctatcacagctatcaccatataaataggaaacagcacacgccaacccaaaccgaacgacggaatggcctgtgtagctccccacattgcaatgtaaggtgcaagaaacgaagcaaccgcctttacaaattgtccgaaggtaaggctacttgccagccggtcacctctcacgatgttggaaagcagcggattcagtgaagtctgcatcaatgcattgccgatacctaataaagagaaagaaagcagcatcaacgtatagctatcaccaaaaacaggcaataacaacgaagcaaaggtcacaaccaaactaaggagtaccgtctttttttgtccgatacggctcatcaacatacctgtcggcacagagaagatcaggaaccagaagaaaaccagcgaagggaagatgttagcttgagagtcagtcagacccaaatctgcttttacatagttggaggcgatgcctaccagatccacaaatcccatagcgaaaaagcagagcatcacagggatcagcttggataacgaagaattagatttcattgttgtatggtattaatttaagtatttcttgctcggaaaagcacgttgcaaaggaagcgaatatcagaacaacaggataacaatcttgttacaaagagtggcaattatgatacaagaatgttttttaagcgcatttcaagggcattatttctctttttagctacatttgtggaaaattatccaaagaaactttttaaacaacaatatgaaaacactctttaatggacgactcagcattgaagtttctgcacatggagcagagctatgcagtattttttctaatggaaaagaatatctatggcaggcagatcctgcattctggaaacgccattcgccggtactcttcccgattgtaggaagcgtatgggagaatgaatatcgaaacgaaggcaccacctatgtcctcactcagcatggatttgcccgcgacatggagttcacactgatatccgaggaaaacgatgaagtccgctaccagcttgtcagcaacgaagaaacactcaagaaatatcctttcccattccgtctcaccatcggctatcgcatccgcgagaagaaggtcgatgtcatgtgggaagtagagaataccggggagaaggaaatgcacttccaaattggtgcacatccggcattctactatccggatttcgatgccgaaacgcaagaacgggggttcttcggtttcaataagaaaagcggactgaaatacatacttatttctgaaaaaggatgtgccgacccggacacccaatatcctctgaaactgacaaacgacttgttgccattggacacacatacatttgacaaagatgcacttatattggagggaagccaggtgcggcgggttactctatataataaggagaaagctccttatctcagcctccattttgatgcacctgttgtcggactgtggtcgccacctgccaagaatgccccgtttgtctgtattgaaccatggtacggtcgttgcgacaaagcacattatacaggagagtataaagataaggattgggtacagcatctgcaacccgaagaggtattcaaaggaaaatataccattgaaatagaagaataaaggagaagccgtacctggtccgtatctggtccaaacgcttaggtacggaccagctacggagcgggtacggctttgataaaattcgggtacagaaaaggaggaaatatagaccaatcttatttcaacttataaaccttgaatgaacttaccgcatagctaccgcctttggcatagaaactgatacggttgtaaggttccgaaggaaacacaaggtttgtcattgcgaaacgtccgtcatcgccaaacgcttcaagacttgatttatcaacgaaaagacgcagcgtcatttccgaattgccttctatcggagcaagagtcagcaccggaaagtccgaactgaatgatacgactccgctcttactacgatccatcgcaaacttcttctctaccaagttatagtaaatatccacttcttctccttttgaattgaaaagttggaagccaatgacttctgcatttctgttcttaatcgtcatttcaatttcatacgtacctgtattatccgaaagtagtttgtccatattataagtacggtccaccttgaaggaatgcttcttttcttctttcccacgcagtttcagcagttctcgcgaaggggaagatttcagataagtttcacccgccgaagtatagagactcaggtcacggggaacagagttaccactgcgatactgagtagtaggtacattgttggcatattgccagttgctcatccatgccagcgctatatggcgtccttcgggcgcattactccaagtcacggtagcatagtgatcttttccccagtccatccacttggtgtttttcggtgattcattcacaaacttctttccatcgaaggtacctacaaaatattgagtggcacttccaccgaaaggtccgccgggattaatattacagattagaacccatttcttcagttccgtaccttcaataggcagttctatcaggtcgggacattcccatacaccaccatgagccccctgaccttcaccgaaactactttcataagcccagtccttcagattagctgaagagtagatttgcatttcctgacctacggcaagaatcatgatccatttatcggtagcgtcatgccagaaaactttcggatcacggaaatcacgttgggtggaagtcagtataggattacgcgcatacttcttgaatgtttttccgttgtccagactgtaagccatactctgtacctggcgatcgctggccgaagtatagaaagctatgatcgcaccggcaccaaagcctgccgtattatccttatcaaccacacaggaaccactgaagatagttcccaacgcatcgggcgcaatggctatcggctgatgttcccaattcaccaggtctgtactggtggcatgtccccaatgcatatttccccacatagaaccgtaaggattgtattgataaaacaaatgataaacaccatctttatataccataccgttcggatcattcatccagccatattgaggagtgaagtgataaagcggacggaaactctcgcgattggatgtatcaaactcattggaaagtttcatttcatcccagcaaatagccgtatcgggtatcaactggaagttgaaagaaagtgatttattatcaaatccggagagatctaccggaacaaaatagtctaccttatttatagccagacgaacattcatattgcgcactacgtcattatcggctatcatatatagctttgcctccggagcagcctcttccacgggaagcaacagaaatttcttctggttctcaatctggacaatgctctgtccgtcacctaaatgtttaatcacaaaaggaggattaatagcctgacacgaaaagacagaccagattgtacctattataaaggtaagggtccatcgcacagtcaacaaattgttttttaaattcatgatgtttttgggtattacatttaattaataatgggttgctcgggaaagcactttgcaaaggaagcgaataaaacagaaatagcctgccatttatgtttcataagctggcaaatatgatacctgccctttattttgttacaaatataccagcttatgaaacataaattacagcatattttcacttaattccctttctttgcaacatcaaaacatcactcgggaaagcatgttttgagaggtaatccacagcgattacaaaatgaaaagcatattaattaaaatctaaaaacatggaaggcataaaaagatcacttctatttgcactctttcttataatgtgtacactagttcaggcccaacgcctgacggtacaagggaaagtggtttccaagactgacggagaatccattatcggtgcaactgtcatagaaaccaaccagacaagtaacggcaccataaccgacatcgacggtaactttacattgtctgtaccacaaggcgcagaactctccatttcgtatatcggattcaagactgtgaatgtgaaagctcaagctacactgaatatcgttttggaagaagaatcggaattgctacaggaagtcgtagtcacaggttatactactcaacgcaaggccgacctgaccggagccatctccgtagtcagcatagacgagattgccaagcaaaacgaaaacaacccgatcaaagcattacagggacgcgtccccggtatgaacatcacagccgacggtaatcccagtggaaacgccactgtacgtattcgcggtgtcgggactttgaacaataacgatcctctttatattattgacggtgtacctaccaaatcgggcatgcacgaactgaatggcaatgatatcgaatctatccaggtattgaaggatgcggcttctgcctctatctatggttcacgcgctgcaaacggtgtcatcatcatcactacgaagaaaggtaaagaaggacagataaagattaacttcgatgcttctatcgccgcttccatgtataccaataagatggaagtactgaatgcggaagaatatggccgtgccatgtggcaggcttacgtaaacgaaagccaggatcccaacaccaacgcactgggctataagtatagctggggatatgacgcaaacggttatcctcaactgaacaacatcagcatgtccaagtatctggattccgccaatacggttccggctgccgacaccgactggttcgatgaaacaacccgtacaggtattatccagcagtacaatgtatcagtaagcaatggttctgaaaaggggtcatctttcttctccctgggctattataagaatataggtatcatcaaggacagtgacttcgaacgtttctctgcccgcataaattctgattataatctgattggcaaattcctgaccataggagagcacttcacactgaaccgcacttcggaggtgcaggcaccgggtggattcttgcaaaatgtattgcaattcaatccctcattgcccgtttacgacatcaatggagaatatgcaggtccggtaggcggatatcccgaccgtgagaacccggtagcgagactggaccgtaactctgataatcgctatacttactggcgtatgtttggtgatgcctacatcaacctcaaccccttcagaggattcaatgtccgctccaccttcggattggattatgcacagaaatcacaacgcatcttcacctaccccatcaccgaaggcaatgtggcaaatgataagaatgccgtagaagccaagcaggaacactggacgaaatggatgtggaatgccatcgctacctacaatctggaaatcggcaaacatcgtggagacgccatggtgggtatggagctgaaccgtgaagatgatatcaatttttcgggttataaagaagattattctatccttacacccgactatatgtggccgaatgcgggttccggtacggctcaggcttacggttcgggcgaaggctattcactggtttctttcttcggaaagctgaattatacatatgatgataaatacctactctcgatgacagtacgccgtgacggttcttcacgtttcggtaaaaataaccgctatgccacattcccttccttctcactgggatggcgcttgaaccgtgaaaagttcatgcaaaacctcagttggattgacgatctgaaagtccgcggttcatggggacagaccggtaaccaggaaatctcgaacattgcccgctatacaatttatgttcccaactacggtgtaacggaatcaggcggtcagagctatggtacttcctacgacattgccggaaccaatggcggcagcatccttcaatccggattcaaacgtaatcagatcggtaatgataacatcaaatgggaaacaaccacacaaacgaacctcggcctcgatttctcactgtttaaacaatctctttacggttcattcgactggttctacaaaaagacaacggatattctggtacagatggcaggtatcgccgctatgggcgaaggaagcagtcaatggatcaatgcgggagaaatgaagaatgtgggtgttgaattgaatctcggttatcgcaatcaaacgagattcggactgaaatatgacctgaatgccaacatatccacctaccggaatgaaatcacaaagctgccaactacggtagcagccaacggcactttcggtggtaacggtgtacaaagcgtaatcggtcacgccaatggttcgcaggtgggttatgtagccgacggtatcttcaaatcacaggaagagattgataaccatgccactcaggaaggcgccgggataggccgtatccgctggcgcgacttggacggcaacggtatcatcaacgagaaagaccagcaatggatttacaatccgactccggacttcagctatggtctgaacatctaccttgaatacaagaattttgacctcaccatgttctggcaaggtgttcagggagtagatgttatcagcgacctgaagaaggagaccgacctttggagtggactcaatatcggtttcctgaacaaaggtaagcgagtactcgatgcatggtcacccaccaatccgaactctaccattcctgcattgtcacgcagcgatacgaacaatgagaaacgtgtttccacttactttgttgagaatggttcgttcctgaagttacgcaatatacagttaggctacaacgttccgaaaaactttgcccagaagatgaagatggagcgcctgcgcttctacctgagcgcacagaacgtattcaccatcaagagtaaggagttcaccggagtagatcctgagaatgccaactatggttaccccatcccgatgaatataactttcggtattaatgtaggcttttaacaataaaatcagttacttatgaaaaagttaatatatacagcagtcttaggtctttcactgatgtgcggcagttgcaccgactttctggaagatcagctcccccagggaaccatcagcgacgaacagctgaagaacccggcatacatcgacaatctggtaatctctgcttatgcagtatggattactgccgaagatatcaattcttccttctccatgtggaactatgacgtacgttcggatgacgcttacaaaggcgggaacggtacggaagacggtgatgtattccactcactggacatctcacaaggtatcatgactacggcatggaacatcagcgatatgtggcagcgcctctacaactgtatctcacgcgtcaatacagctttgcaactattggaacaagtggatgaaagtacttattcactaaagcaacagcgcattgccgaaatgagattcctccgtgcacatggtcacttcttgctgaaacgcctgtacaagaagatcccgtttgccaacgatgccaacttgtcaccggaagaatataactatctctccaacaccacttacaacaatgacgaaggctggcaacagattgcagatgacttccagtttgcttatgataaccttcccgtgaagcaggcagacaaaggtcgccccgccaaagccgcagccgcagcctatctggcaaagacttatctgtacaaagcttatcatcaagataatgcagacagccatgaagtgacaagcctcagcacggaagacctggtgaaagtagtgcaatacacagacaatgccattatgtcggcaggcggctacgggctggaatcagattttcacaataacttccgtccggaacctcaatatgaaaatggcgtggaatctttgtgggccatgcaatactccatgaacgacggtaccaacaacggtaactgcaactggtcttatggtctgatcgttcccaacattccgggagttaccgatggtggttgcgacttctacaaaccgagccagaatctggtaaatgcattcaaaacagatgccaacggacacccgctgctggattcatttaacaacaccgattacaattcgcaatccgattatgctgacccacgcctcttcctgacggtaggtatgccgggattcccttatgaattcaataagaactacatgatggaccagtcgactacctggagccgcagcaacggactttacggatattacgtgaccttgaagcagaatgtggatccggatggcgattacctgataaagggtgcctggtggggttctccgatgaaccgcatcgtactgcgctactcggatgtattgttgatgcgtgccgaagcactgatccaactgaacgacggacgtatagctgaagctatcagcctgattaacgaagtacgtaaccgtgctaaacaaagcacagccatgattgccgactacgaaatggaatatggcgtacgtttcaacattcagccttatacgggaagctactcacaggcagatgccttgaaattgttgaagtttgaacgtcgtgtagagctggctctggaatcagagcgcttctttgacctggtaagatggggcgaagctgccgaagtactgaataagttctatgccgaggaagctgccgactgcaccatctacacgaatgcctcgttcactaagaataaaaatgaatatctgcctatcccgtttgcacagatgagtgccagcaacggaaactatacgcagaattgcggtaactggtaaccttataaaaaagaagaacattatgaaatcaatactgaataaactaaatctgcttgtaatgggaaccgtcctgtcgttgacattcccgggatgtagcgatgataatacttccgacctgaaactggacggagacacatggctcaccgcccttgaactgaatgatacctatacgggtgtgatagaccggaccaataagaccgtaactgtggcagtacccgaagtatacgacactgacgcaatgaaagttaccggtatcgaagtatccgaaggtgccgaggcctctgtaaaggcaggcgatgtgctgaacttctcattcccccaggtgataaaagtgactaacggaaacgtattcctggactacaccgtcaacatcaagcatgatgaagcgcggatactctccttcaaactgaatgacgcttatgccggagttatcgaccagactaaacgtaccatcaccgtacgtgtgccgagttcagtcaatatcaaaaacatggttccgatcattacaacttcggcaggagccaccgtaatgccggcatccggccaggctattgacttcagcaatcctgtagaattcaccgtttcatacaacaccgcatctgccgtttatacggtaacggttatcccgaccgatgcaccgagtgccgtatatgtgggtctggcagctacactgaacgaactgaatccggaagaaaaggaagcggcaacctggatgctgaacaatattgccaattcgcagtatatctcattcgaagatgtgcaggcaggaagagtagacctgagcgaatgtgaaatcatgtggtggcatctgcatatagacggcggcatcgacaacatggataagtttgaaaaggcagtgcctgcggcaatcaacgcattagtaaagatgaaagacctttataacaatggcatgaacctgctgcttacccgctatgctacttattatgccgccaaactgggtgctaccctggacggcaacaacccgaacaactgttggggacaatcggaagaatccggtgaaatagtaggtggtgcatggaacttctttatccagggacacgagtcgcacgccctctaccagaacctggtgatgaacagcggtgaaacagacaaggtctataccttcgataccggttaccgaaccaccaacagtacggcacaatggcacatcggttccgactggggcggctatgctacgaatgaagtatggcgtaccaatcatggcggtgttgatctgggttatggtggcgatggtgctatcgtggcatgggaatatctgcctgaagactctcgcggaggtatcgtatgtatcggctcaggatgttacgactggtatgcttacggcatagatgcttcagcagacaagtatcatggcaatgtagccaaactgacagagaatgcaattgactatttaacgggtaaataaaactaatatatgaaaacaatgatatattcactcacactggctgctctgatgatcacttctttcagcagctgtagcgatgacaatgatccggttttaactcagaaagactgggacggaaccaccacttattttgcttcggcagatgccatgaagttcgatacctactacaagccatctgttggttatgtaggcgatccgatgcctttctatgatccgcaggcaaaagatttcaagattatgtatctacaggaataccgtccgaaccaagcaggcacttaccacccgatatgggcggtaagtactcaggacgccgcttcatacacatctatgggtgaactgatttcttgcggaggattgtcggagcaggatgccgctatcggaacgggtagtactatttataatccttcggataaattgtactataccttctacacaggtaacaaatatcagcctacttcttccgagaacggtcaggtagtgatgtatgccacctcacccgacttcaagacctggaccaagaatcgcactttttatctgaagggtgacactgacgggtacagcaagaatgatttccgcgaccccttcgtttttgaaggtgaagatggaaaataccacatgcttgtttccactactaaaagcggcaaaggggtactggccgaatatacttctacagatatgaaggcctgggaacatgcaggtgtattcatgaccatgatgtgggatcgcttttatgaatgtcccgatgtcttcaagatgggagactggtggtatctggtctactcggagatgcatgcagccgtacgcaaagttcaatatttcaagggacgtacattggaagaactgaaagcaaccaccgccaacgatgccggtatctggcccgacaaccacgaaggtttccttgactcacgtggcttctatgcaggcaagacagcttcggacggaactaaccgctacatctggggatggtgccccacccgctcgggcaatgacaatactgccgttggagcttctccgaacgaaccggaatgggcaggaagcctggttgcacacaaagtagttcagcatgcggatggtactttgactttaggcttagtagaaggtatcagccagaaatatgccaccgcctctactgtaaaagtgatggaaaagagtagcggagtatcagaaagcaacggtaactatactctgacggataatgcttatatcctattcaatcgcttaaatgtaaacaacaagatttcgtttaccgtaaagacggcaggcgatgcagatagattcggtatctctctggtacgcggcacggactccaaaaagtattataccattgtagtgaatccggaagacaacaataacaagcgaaagataaacttcgaagaagaaggtgaagaaggtaaaggattcatcgacggaatagacgggtatctgttcgacagacctgctgataatacttatcatgtaactatctgtacggacaactctgtctgcgtggtttatatcaatgataatgtggcttatacaaaccgcatatatggtatgcagaagaatccatggtctattaatagttattcgggaacggtggaagtcagcgctgtgaaggttagctattactgagttaattcaccacagagtaacactgagtttcacagagttctataagagttttacataccacgtaaccatctgtgtgacaacgcacttggtgttccatcacgatcagtcgtaatgaaacacgagttcagtcctagtgggaggtaccttcagtcctagtgggaagtgccttcagtcctagtgggaaataccctcagtttaatatagtgaacgaatcattgaattgttcatatcagacttactaaagtttgtagaccaacaaagattaagaataaaaaacgcattgccagataatgattgccactttatagcaatcattatttggcaatgcgtttacaatattttgattaatcactgaaagtcatacttcgccgcacatgcataaccttcttcatacaaatcagtcaatttcctgatatcccgttcgatacggtcgactgttacaggtttctgcggacggattacagtaatctctcctgccgcttccatacgttccaccatttccaactgctcgttgtacacacggcaacgacggcttaaagcctcacgcactttcgggtatttacggtacaggaaagaaggtatatgtatgtcctttgcttctttacgataaccatgattacgggtaagcactaccacattatgggtaaatccctcactcctggcacgcatcagcggaatactgtcgacaatacctccgtcaagcatcggctcattatccacataagcaatagggcagacaaaaggcaggctgcttgaagcacgcacaatgtcaatcacacgatgcttgtcccgtttctcctcaaaatagttagcctcacccgtcacacaatttgtagtcaccatttcatagcgctccggacaagagaaatacgcttcataatcataaggaagaatgtgttcgggaaattcctggaacagcagatcgaagtccataatattacgtttcttcaacaaatatttcaacccgatatactgatatttctccagtaagtcaatgttactgtacttggcacgtccgcgctggccggacatataagaaagtccattacatgctccggcactgactccgatagtataggggaagcggatgccacggtccataaagctgtccagcacgccacaagtgaagacaccacgcatgccgccgccttcaagaaccaatcctgtctggggtttgatatgtatctttttctccataattatctgataaaacgctccaaagatagcttttgtttccgaaatctccctatctttgtgccagtaacaatcatttaatatcaatttaattatgatgaaaaagtcaatacttattgccactttaggcttattgagtttcaatgtgtcagcacaggacactccgaaagcggaagaaggcttcatcttcacaaccgttaaagaaaacccgattacttccgttaaaaaccaaaaccgttccagcacatgctggagtttttcggctcttggtttccttgaaagcgaattgctgcgtatgggcaaaggcgaatatgatttatcagaaatgtttgtggtgcaccacaccatgatggaccgcggcgtgaactacgtacgctatcacggtgacagttctttctcacccggtggaagcttctacgacatcatgttctgcctgagaaactacggtcttgttccgcaggaagctatgccgggcatcatgtacggtgacacattgccggtacacaacgagttggatgccgtggccggtgcttacgtaaacgctattgccaaaggcaaactgaccaaactgactccggtatggaagaaaggcctttgctctatctatgatacttacctcggcaagtgtcccgaaaacttcacttacaaaggaaaagaatatactccgaagacatttgccgaatccctcggaatcaatccggacgattacatatctctgacttcatttacccaccatccattctacactcagatgaacatcgaaattcaggacaactggcgcaacggcctttcttataacctgcctttgatggaattcatgtctgttatcgacaatgccgttaacaacggttacactgtagcttggggtagcgacgtcagcgaaagcggtttcactcgtgacggcatagccgttatgcccgatgcggatcgtggtgccgaactcaccggttccgacatggcacgctggacaggtcttactgccgccgacaaacgcaaagaactgacttcccgtccattaccggaaatcaccgtaactcaggaaatgcgccaaacagcattcgacaattgggaaactactgatgaccacggtatgcttatctacggtatagccaaagaccagaacggtaaggaatactacatggtaaagaactcctggggtaccaacaacaaatacaaaggtacttggtatgcttctagacctttcgttgcttacaaaactatcaatatcctggtacacaaagatgcagtgcccaaagcattgctgaagaagctgggagttaaataagtgattagtggtgagtgattagtgctgtgctgtcattgccgcatggtactaatcacttatcactcactactaatcactatttcatcatcctactgttaatatattccgtaaactgatccttataattctctcctaccggaatataggtctctccaaaaacgatgcgcaggcgagaaacttccgttatctttttcaaattgacaatataagaacgatgtacccgcataaactgagaggggggcaaagtttcttccagacgcttcatgctgagtaaaggcataatgggcttagcctctccttctacaaagatacgtacgtattcgctcattccctcaatatatttaatatctgccaagttgatacgcgtaacgcgataatcactcttcacaaacagagtaccgtcattgaaagaaagttcggacggagttgacggtggagcaactgttccatgacctttggtgcggaattcccaccatttatacgctttgtccaccgccttcaggaagtcttgaaagccaaacggtttcagcagataatccagtgcatctactttgaaaccttcgacggcatactccgaataagctgttgtgaagataaccaacggcttttccgtcagggaacgcacaaagtccatcccattcaggtcgggcatattgatatcaacaaacatcagatcaatcttctgtgcggaaagaacactcatagcatcgaaagcgtcttggcaggaagctacaagattcagaaaaggtacacgggagatatatcccgtcagttgggtaagagccaacggctcatcatcaatagctatacaatttatcataatatacctccattctgtattaactcaccggcacaagcaactgcacatcaaaacaatcggccgtatcatcaatagatagtttataacgctcaccgaacaacagacgcaaacgcttacggatattatcaagaccgataccgtggtgctgatcttcggacctataataattactgttggaacaaacgaaatgaatttcctctcccaccacctgcaaacagactgatacgaatgaagcatgctgataactgacaccatgcttaaaagcattctctacaaacgaaacgaacaataggggcggtacttgtacttcgcccgtatccgtaggaaaagacacatctatccgcactttatccgtatagcggatgcgcatcagctctatataatgattgaggaactgcaactccttggaaagcgatatcaagcggttattcgattcataaagcacatagcgcattaaccgtgaaagttcgacaatggtttgtttggccttctccgtatcaatatccaccaatgcatgtatattattgagagtattcatgaagaagtgcggatttatctggtatttcagataatccaactccgtctgaagattgttgtgctccagttctttcatagcctcctgatcgcgtactgacttaaaaaacagcttaacagcaatgttgaaactgaacataagcaaagctatcagcatgcgccccagaaaaggaccacgaaacaggggcacaaagaaaggcatctcttcgaaaggcggacgtgggaagtcagaatgccgaggatcaggacgtcccccccgtacagacggtatatccggccccgaaggcttaccgggagcatcatgctctctcggcccgggcccttcctttccccggtcgcgcattctctgttctatttgctgccgcttcatgacaggacgactgggagacaccatatccactacccagaaagtgaccgtagacaacaatatggcaactactacatacactaccactttctgcttcaggaaaaggaaaggagcaagcacacgattattcaacaagaaaaggaaaaagaatggcaacacattgagccataaaataaaaactcctttccatcgcatcacttccaccttacccgataaaagttcgaagaaattgcttaccaccggcaccatcagtacgataagccacacagcaatgtagatcatcatttccggcaggtaacgtttataggtagtacgggcaaacactttcttcatggtttgtttcctttttagagatgtcatggcaaatatagccgactttcgattaactgacaaaagaaatagacgaggaggagcttttcatcggcaaagttctcattaccaatgccaaccacctccgccaccaccaggacctccggaagatacgtttcctaccgaagtcaccatactgctgggcgtaaaagtcgctacctgtgaacctgttgtataggtgccaccaacagtcagtccatagaattcagtacctccggtcaccgaaccgcctgtataaatcgtataagtggtgcccgatgccaacttcgaactgctgaacaacaatgtcatttgcgaataagcacggggaatagtgtaagacatcacctgatcagaaccttgaatactcaaaagcgtacctttactacccgaaccgccatagataaccgtgcgttgtgtacaaacgctggacgtgggagtactagtgccgccaccgattcccaagatagttcctcctgttatcttaaaagtattctgatcgcagtcaaatccttcctcgggagatgtagtaccgatagagacaatcgtaccaccggtaatagtcagggtaccgttagaatcgacaccatcatttccactgctgtaacaatagatattaccgccgttgataacaatgcttttagaagcattcatacagtcatcataagaatagacgctgacatcaccaccattcaccgtaagggtacttttgctttcaatcccttcacttccttcaccacccggggtcttcacccagatagtaccggaattgatagtcaaattaccgtctgctttaatgcctttggcggaggaatccagacgattatagacatactgtttaccggtagtgataatcttcaccgtactattatcgacactcagagttccgtcgcaattaatacctttaccggcagcacccgtacttttgactgaaagagtagtaccattcatcactaggttaccatcacatttgatacctgcggcagaactcagatcattgtcttcatagaccgcagaacccgaagtcagcagaatcaactgccccccactgagcgtgatgtccgtttccgcctttaccgctttagaggcatccccagagatgtcagccttgataagtccgccccgtatatcaatgaatcctttttcacagtccaacccatcaccggatgctttcaccttcaggataccaccaccaataatgattttatcattcgtatgaattccatctttcgcggcagaagctacggtaatattgctgccgctacgcaaacgcacatagtcgtcactacaaataccatgcttgtaattacctgtcacagtcagtgcacccgtaccgctaaaaataagttgtccttcactaaaaaagcatcctttttcatcttcgcccgttacggtggagtaagaagaagcatctgccagatagttctccgtttccgtcttcacttctacaaaaacacgcttgccggactggatattgattgccgccccgctgtcattagtcagcgaaacacccgcaagagtcagtttaaacttcttatcactgtataccttgaaagagccgttggatgccgaaccactaagcacatattctacacctgctacggatgcatttactgtgacatgtgctccgtttgtggttactgtaaccccactcacagagcctgtcaccgttgccgaaccattagcaaatgctatttgtatggaagaagcgaatgatgaattttctataaagtcatcatattcatcatcattcttgtcggttatgatagtttcagctatttcaacatatgaattatcagctatatcttcccacgaaacatcaaagtcaagtaatgtacccgaagcatccgaactgcctgaacttccaccggggttcgttcccccattcgtcccgttctctccccaatcatcaaaaggactatcagcactacacgcgacacacaagcagaaacacactgcataaatccctattttctgtattcgtttcatttccatcatctatttatgtgactaataaatcattcacttaaaacttaaacgtatatcccgcacctactacgtgcccgttcgtctcgtcatcatctgcatgattctgataccgatagaagaaatcaagtgaattcttcttgttgattttgtatccggtacccagtgtccagcgagttttatccagtgcccaactatcggacatggaatgatataattcacaagaagcataaggtgcaaaacgagatttcttaatattccattcagcctgcaagcgtgaacgaagtacattcttacctttgccggtaatttcctcatctgctttttgggaaccatcgtccccatcgtacttggaaacaagctgcgaagtacgatacgtatactggtaacgttcgcgcaaggaaaattcaaagcgttgccagttcaacttacctgtcaaagacaagtacatacgatgacggggtgaccagtagtcagaaacataattgcctttcttggtcatctctcccggacgatggctataaataaaagtatatccgccatccgctttcaaaaaagaagtgatgcgataagccacacccgcccccgcagaccagcgttcaacattatccacaccatcacgagtacggaattcaccttccaccgaagcatcaaagcccgggaagattttcttctttacctcggcactggtccaaatgccgaagtcatcactttgggcatatactcctgcaaccattgtgcagagaaaaacagccagtaaggttattcgtctattcattttcttcattctccttccctcggtattcgtcttagtgtatcaattgtatttatctcttcactctccggttcataataaaccttcagtatcgctgcatctcgtaggaaatcaatatggcccacttctactttcgtgatgctaagtcccgttctattttccaaatccataatcaattctgccctgcgttgcggggtaatcaattcaatacgatcatactgcaccagcttgcatgaaatatgtttcagccaacgattgctttcgcataaccagatacacagaataaataataagtttgttgccgtcagttcggcataactcaactgtacagacagagcgttgatgacggaaatagctataatcacaaacaggtaggtcatctcacgcacaggcatcgactctgtccggtagcgaattatgccgaagatagcaaacaatccaagtgcaaatcctattttcagtttcacactgcccaacaggaatatcatcagaaaaatactgatactgataagcgtaaatgtgaagaagtaatcgcgacgacggctcttcgggtaataaaagaaacgaataatggcaaacaccaccaccatgttgagaacgaagcgcaatatcaattccataaatccagccgcatctataagcggcgtctccataaaggctaattcagcaaaatcgttcatatactatttattaatgtttctatatttcggggaatttctgccctcctcattttacgtactttcggtttgaagcgattctgtttcaagttttcatccgtcagtacacaacccatgcaatatttactaaaacctgcgggatgtacatgcaagcggcttaatatatcgcggatgggcgatgatgtacgcccgtctcgctttaactccaccacagcaagacgtggcaaggcagcataattcccgttcaccagatttcggaagcaaatatccgtatcaatagtaagccgttccgtcattgcccggttgacaagagtaatgcgctgaaaacgattctccaactgtggagacaattgcggcagcttgtaccaggcatacaaagacaagaagtcatccacaccttcagcagacagttcatcaagagcagtgatgcgtatacgccgcttgtccgtgcgacctttattattcttatttttgacttcaagaaaagttaattgggaagcaacataggtacgtaccctgattttctcacgtaccgcccgtccgttttgatgtgcccgatacattgctttgtctacagtatccagataaacagtatgatagacaatgttccgttctcccgtcacttcctgtacgcgataatcggcggcagcataatgcaaaagcacagccagcgtttccaagggcagcagatatttcgtatccgtcctgttcatcaatcggataccactcatttcttccagcgtgacaggaccgaatatatccagcatttccgctatatccttcaatatttcttctgttatcatacctgctttgtttctgcgacaaatgtaaccgcaggagtgaaacaaagaaaatagattcaaccaataagtgatttttaacgataaacacaatcaaaaacgatgtagttcttctgccctattttgctcaaaaccgttctgtatgtgcattttttgcccgcatttcttgtcagaacgaacagtttgactaattttgcacgctgataattagttaaccggataatttcagtagctggacaccgtgtacctactactcctattcccggcactgacgctccaaagaaatactaatactaataattaataacatgagtttgaaaatcgtagtattggctaaacaagttcccgacacacgtaatgttgggaaagatgccatgaaagccgacggaaccattaaccgtgcggcactccccgccatcttcaaccccgaagacttgaacgctcttgagcaagccctccgactgaaagatgcacatccgggctctaccgtaaccatcctgacaatgggaccgggacgcgcagccgaagttattcgtgaaggaatgttccgcggtgccgacaacggctatctgttgaccgaccgtgcttttgcaggtgcagatacccttgccacttcgtacgctcttgctactgccatcaggaagataggcgagtatgacatcatcatcggcggacgccaggctatcgacggtgacacggctcaagtgggtccgcaagttgctgaaaagctcggtctgacacagatcacttatgccgaagaaattctgaatgtggagaaaactaccggacgtgttgtcgtgaaacgtcacattgacggcggtgtggaaacagtagaaggccctctgcccatcgttatcactgtgaacggaagtgcagctccctgccgcccacgcaacgctaagttggtacagaagtacaaacgtgctctcggtgcacaggaaaaagcagctatcaccaaagaaggtgctaccctgccttatgccgacctctacgagaagtacccttatctgaacatcaccgaatggagtgtggcagacgtgaacggtgacctggcacaatgcggtctcagcggttcgcccactaaagtaaaaaccattcagaacatctctttccaagccaaagaaagccgtacactgaccggaagcgaccaggatgtagaagatcttattgttgaactactcgctaaccacaccattgggtagttaacaaggcgacaagagacaaggtaacaaggcatgtcctcgtcaacttgtcaactcgtcacctcaaaaacttaaaagaaatatgaataacgtatttgtatattgtgagcttgaaggcaccgtagttgccgaagtaagtctcgaactccttaccaaaggacgcaagttagctaaccaactgggctgccaactggaagccgttgttgccggtactaaccttgcaggcatcgaaaaacaagtattgcccttcggcgttgaccgtcttcacgtcttcgacgctccgggcttgttcccttatacttcactgccccactcttccgtacttatcaatctgttcaaggaagaaaaaccgcagatctgtctgatgggcgccacagttatcggtcgtgacctcggtccacgcgtttcttctgcactgaccagcggcctcactgccgactgtacttcattggaaatcggtgaacacgaagataaaaaagcaggtgtagtatatgaaaacctgttatatcagatccgtcccgcattcggtggtaatatcgtggcaaccatcgtcaaccccgaacatcgcccgcaaatggcaaccgttcgcgaaggcgtaatgaagaaagaaattcttaacgataagtatcagggcgaagttatcaaccatgacgttgccaaatacgtaccgactacagactatgtagtgaaagtaatcgaccgccatgtagagaaagcgaaacacaacctgaaaggtgctcctatcgttgtagccggtggttatggtatgggtagccgtgaaagcttcgacatgctgttcgaactggctaaagaacttcacgctgaagtaggcggcagccgcgcagctgttgatgcaggcttctgcgaccatgatcgtcagatcggccagactggtattacggtacgtccgaaactctatatcgcctgcggtatctccggacaaatccaacacatcgccggtatgcaggaaagtggcattatcatctctatcaataatgatgaaaatgctcctatcaataccatcgctgattatgtaatcaacggtacggtagaagaagtgattccgaaaatgattaagtactacaaacagaacagtaagtaagctatggctaatttttataccgaagttcctgaattgaagttccaactgaacaacccgatgatggaacgtatctgtgagctgaaagagcgcggataccaagataaagacaaatttgactacgctccgcaagactatacggatgcaatggactcttatgataaggtgctcgaaatcaccggagaaatcaccggagagattatcaacccgaacgccgaaggcgtggacgaagaaggtcctcactgtgccaatggtcgcgtagaatatgccagcggtacgagacaaaacctcgatgctatggtgaaagccggcctgaacggtatgactatgccccgccgcttcggtggattgaacttcccgatcactccgtataccatgtgcgctgaaatcgtggctgctgccgatgccggttttggtaatatctggtctttgcaggactgtatcgaaacactgtatgaattcggcaacgaagatcaacacagccgtttcattccgcgtatctgcgccggagaaaccatgtctatggacttgacagaacccgatgccggttccgatttgcagagtgtaatgctgaaagctacatttgatgagaaagaaaactgctggcgcttgaatggtgtgaaacgtttcattacaaacggtgacgctgatttacacctcgtactggctcgctcagaagaaggaaccagagatggccgtggactttccatgttcatctatgacaagcgcgaaggtggtgtagatgtacgccgtatcgagaataagttaggtattcacggttctcctacttgtgagcttgtttacaagaatgcaaaggctgaactttgtggtgatcgtaaactcggtttgattaaatacgtaatggcgctgatgaacggtgcccgtttgggtatcgccgcacaatccgtaggtttgtcacaagctgcctataatgaaggtctggcatacgcaaaagaccgtaagcaattcagtaaagctattattgaattcccggctgtatatgacatgctggctatcatgaaagctaagttagatgcaggtcgtgctttgttgtaccaaacatctcgctatgtggacatttacaaagctttggatgatatctctcgcgaacgtaaactgactccggaagaacgtcaggaacaaaagaaatattccaaacttgctgatgcctttactccgctggccaaaggtatgaattccgaatatgccaaccagaatgcttacgactgtattcagattcacggcggttccggtttcatgttggaatatgcctgtcaacgtatctaccgcgacgcccgtatcaccagcatctacgaaggtacgactcagttgcagactgtagccgccatccgttatgtaacaaacggttcatacgctgctactctccgcgattatgaaacaattccttgcagcgaagaaatgcaaccgttgatggatcgcctgaaagagatgacgaataagtttgaagctgtcaccaacgcaacgaaagaagctgcaaaccaagagttgctggacttcgtagcccgccgtctttacgaaatggctgctgtatgtgtgatgtctcatcttctcattcaggatgcaacaaaagcacctgagttgttcgcaaagtcagctgttgtctatctgaactacgctgaagctgaagtagaaaagcacttcaatttcatccgcaagttcaaagctgaagaactggataactaccgtaagtaattaaccgattactatattcaaagaaggctgtcccattcgtttgagacagccttctttgtcataaatagcacctttaccggaacaacctcaactgactgcgcagctcatgaagttcattctgcatctcctccatacgctgtaacagatgatggatagcatcaatcccttcaatattgatggacaagtcataatacatgcggctgtaacgttctatgtccggtaattgagtaaacgtcagataacgttctccaccttcagtcattacttctatcaagccaccttcctgtaataagtcgataaacgacggctcaatgtggcacttgcgacaatattcgctgactatgattaattcattctgcatagtgatacctccttttagttcatactttgaagtttacggaacaactctttctgtgcttccgttaagttcgtcggcagtttcacggaataagtcacaatgaggtcaccgaactgtccttctttcttatatacagggaatcccttgcctttcagacgggctttcgtaccgttctgtgtctcgggtttcactttcagttttacctttccatccaaagtatctaccaactggtctccacccaggatagcggtataaagatcaataggcacatccacatacaagtcatcccctaaacgcttgaataccggatcatccgcaatcacaaacgttatgtacaagtctccggcaggtccaccattcacaccttcgccaccgtaacctttcaatttaatgacttgcccgtttgccacgccggcaggaatggtaatacgtacattcttcccgtttacagtcaacacttgtttatgagtctgggctgcatcacgaagtgacagattcaaatctgcatggtaatcctgaccacgaaaacctgcattagaactaccacgtccccggtttccgaacatagattcaaagaaatcggagaagccaccaccatgcccggaaaattcctgtccatcggatgaataccagtaagagctaccatccgtaccatatcctgcacccgagccaccgccaaagccaccaaaaccactggcacccgcctcctgacgggcacgcttttgggcctcaaattcatcggcatgcttccaatgctcaccgtactcatcgtacttcttacgtttctcagggtcacttagcacttcgtttgcttcattaatcgcctgaaatttatccttggcagaagaatcgttcggattcagatcaggatgatatttacgtgccaacttacggaacgccttttttatatcattctgacttgccgtcttgtccaccccaaggacttgataataatctatataagccatagtctattaattttgttattcttatataccctatcacaaataacgcaccaatcaggagttttgaatactaaaatacgtaaacgaaaattaaaaagaagtattaaaaacaataatataaagataatcaacatattaaccagtagtaatagcttttacctatgctactcaattttcaaaataatgtaaacgacacataacatcaattaattattcatactaaaacttcctaaaataaatagaaaacgctttatttgtatgtgagtaatgcagtcacagaaaacaattttcccccaaccttaatatattgacttattatgaaaagtaaccattggctacttacggtagcactcactttcatcgttctgcaagtaaaagcggattcatggatacgtattaaccaacttggctacttgccgcaatctgtaaaagtggcagtatttatgagtgaagaaccagctgacatacaagagtatgcactgatagacgccttcacgggacaaaccgtccgaactttcaattctaccaaagcaaccggaaaaatgggactcatgaagagtacctatcgtctggacttcagtgattttaaccagccgggaacttattatctgaaagcgggaaaagcggtctcacctcgttttcccatcaataatcatgtgtacaatgggacggctgacttcttgctgaactacatgcgtcagcaacgttgcggctataatccctttttgaaagacagttgccatgtgcacgacggctacatcctgtaccatcccaccaagaccggacaacacattgatgttcgaggcggttggcacgatgcaactgattatttgcaatataccacaacttccgccaatgccatttatcagatgatgtttgcctatcaagaaaatccaaactcattcggtgatttctatgatgctgccgggctccccggcgctaacggcattcccgacattgtggacgaaatcaaatggggactggactggctgaatcgtatgaaccctgctcccggtgaactatataatcagattgccgacgaccgcgaccatgccggtatgcgcctgcccaataaagatgaggtagattatggttacggtccgggtaaaggacgccccgtttacttctgtagtggcgaacctcaggtacgcggtcaatttatgaatgctaccacaggcgtggcaagcacagcaggtaagtttgcttcctgtttcgctcttggtgcccgcctattaaaagacttctatccggaatttgcagcggagattggtgcaaaagcggatgcagcttatcaggaaggtgtaaagaaaccgggtgcttgtcagacagcctccgtcaagtctccttatatttatgaagaagataattgggtagacgatatggaactgggcgctatggaacttttcaaaagtaccggagattttaaatacctggagcaagccgttgaatacggacgtcgcgaacctgttactccatggatgggtgctgacagtgcccgccattaccaatggtatccattcatgaatatgggacattatcatctggcaaaagtacataacgaccgccttagcaaagaatttatccggaatatgcatgccggcatagcacgcacctatgagaaagccgtggaaagtcctttcatgcacggcattccttacacctggtgttccaataacctgacaactgccatgctgacacaatgccgtctgtatcgtgaagcaacaggtgacgaaacttataaagaaatggaagccggcatgcttgactggttgttcggttgcaatccttggggaaccagcatgattgtagaactccctctatatggagattacccttctcaaccgcactcttcattactcaacgcaggtgtaggaaatactacaggcggtctcgtagacggccctgtataccgcactattttcgaaagcctccgcggagtaaacatgacaggtattcccggtactcccggacaggattatgaacgtttccagcctgacctgatggtatatcatgatgccattcatgactactccacgaacgaaccgaccatggacggaacagcttgtctcacttattatctctccgccatgcagaaagaaggtatgaagcaggcggacattcagagtgataagaatgtatatgtaaatgacggtatcatccgcactgatccatcaaagaaacaaataacgcttgtctttactgccgccgataaagcagacggcgctgatgctattatcagtatactgaagaaacatggcatcaaaggcggtttcttcttcaccggtgaattttatgagctttatcccgatgtagtaaaacgactgcgtgcagaaggccatctggtaggtagccacagctatggacacttattgtatatgccatgggaaaaccgtgattcattattggtgacacgcgagcaatttgagcaggatatgctgaaaagttacgaagttatgcgcaaagccggtatcgaatacaaagatgctccggtatatattccgccatacgaatattataataaagaaattgccgcatgggcaaagaatatgggtatacaacttatcaactatacacccggcacgatgagcaatgcggactataccactccggacatgggtgccaaataccgtagcagtaagttcatctatgacaaaatcatggaggtagagaaaaaagaaggattaaacgggcacctgatgttgatacacttcggtaccgacgaccgccgtacagataagttctacaatggttatctggacaaaatgattaaaacgctgaaacggaaaggttatactttcgtacccgtccttgaagcaacaggaatataattcatacccatagttattataaaaaggttagttaaaggttatcatgcaaaggtatttaaggtaatattcaatcggtttgttttcagtagactttttcccacccccaagggaaaaagttgcaaaccaaagctccatgcctgcgaaggtccggagctttttctattgtcagatttaaataaatgcgtgataacgaagaatcagaaactatccttcactgcctgcaacaaagactgaatatcttcttctgtcgtatcaaaagaggtcacaaaacgaatttcattttcagcttcattccagaaataaaagaagtaagacttcatcaatctatcaataaccggacgaggcatagtcaggaacaactgattactctccatcttttgtgtgaattgtacatccggcaatgtttgcaacccttcatatagtttacgtgccatcgcattggcatgtgcagcattctttttccacaaatcatccgtaaggtacgctgtaaactgacaagaaaggtaacgcaatttagaagctaactgagccgactgttttcgtacatagagcgcttcctttttcaggtccggattgaagattattacactttcacctaacatcaatccattcttcgttccaccgaaactaagaatatcaatgccacaatccactgtcagttccttgaagctgagattcaacgcaacacaagcattcgctaaacgtgccccatccatgtgcacatacataccatattcatgcgccaaggtagtcagcgctttcaattcttccggagtatagacagtacctaattccgaacattgagaaatataaacagcacccggttgagaatgatgctgttccccgaagttcttcagataaggacgtatcaactccggcgtcagtttaccatccggcgttgcaataggacgtatctggcatcccgtcatacgggcaggtgcaccacattcatctacgtaaatatgtgcagtctccgcacaaagaattaaattataagggcgggtagccaactgcaaagctaccgcattacttcctgttccattgaaaacaaacagtggctcacaatcaggcgaaaatgtctctttaattttgcgaacggcttccttagtccaaggatcgtcaccatagccaactgcgtgattttggtttgcccggttcagcgcctccatcaccaatggatgtacaccggaattgttgtctgaagcaaaacttctcataattatattgattttatcgataaatagttatagcgtataaataatcctttagctctaaaaaatatgcaaaggaacgaaataattcgttagtagaaaaaaagaagcgtggattttacaatccacgctttcgtttaggttttcaatcggttttttcgttcttacccgatataaacattcacgcccaaaaaaatgtagagctctccgtcctcctggtgcaatacgatcttgtcttcacaagctaaccatcccagggccgctcccagttctttgtccttcagcccggactttctcttcaaagtcccatagtcccacttggcataattgctaagcaacctccaaattttgcctgcgttcaggccgatgtcgcttttgttcatctcttttcgtcattaaaaaggttaaataattgattggtgatttgtttaggttatcctattatcagcctaaaggtatcactttttatttataaaacataaaaaacgaacaaaagatattctttttaatcaaaattgtaacagtttcgtaataatatacaggtaatataagaagaaacaggccaaaaaagagaaaaaaagaccacagccccttcagagagatgctgtggtcatttattataattatgaattcagggaaaaacgggtattacatcatgccacccataccgcccataccgggagcacccattggcatttcaggtttgtcttccttcttctcaacaattacacattcagtagtcaggaacatacctgcaatagaggcagcgttttccaaagctacgcgagctacttttgcaggatcaacgacaccggcagcatgcagattttcatatacatcagtacgggcattgtaaccgaaatcacctttaccttcgcgtactttctgtacaactacagcaccttctttacctgcattggctacgatctggcgcaacggctcttcaatagcacgcttgataatgtcaacacctgtagtctcatcaatattatcacctttgaaaccttccaatgcatcgagtgcacggatgtaagctacaccaccacctggtacaataccttcttcaatagcagcacgtgttgcacgtaaagcatcgtctacacgatctttcttctccttcatttcaacttcagaagcagcacctacgtaaagaacagcaacaccaccagacaatttagccagacgttcttgcaatttttctttgtcataatcagatttagtagcagcaatctgagctttgatttgttcacaacgttccttgatattttgtttgtcaccggcaccgtttacgatggtagtgttatctttagaaactgtgatcttatcagcagtacccaacatttcgatggtagcttgttctagcttcagacctttttcctcgctgatcactacaccaccagtcaatacggcgatatcttccagcatttctttacgacgatcaccgaatcccggagctttcacagcacaaatcttcaactgagaacgcagacggtttacaaccaacgtagtcaaagcttcactgtccacatcttctgcgattaccaacagaggacgtccggtttgtacagccggttccaggataggcaagaaatctttcaggttagaaatcttcttgtcgtagatcaggatgtatggtttttccatttcgcactccatcttctccgtattagtaacgaagtaagcggaaagataaccacgatcgaactgcataccttctaccacaccaatagtagtatcggtacccttagcttcttcgatagtaattacaccgtctttagaaaccttacgcatagcatcagcgatcaacttaccgataaccggatcattgtttgcagatacagaagcaacctgttcaatcttatcgtagttgtcacctactttttcagcttgtgacttaattgagtcaaccactttggcaacagccttgtcaataccacgtttgatatccatagggcttgcaccggcagttacgttcttcaagccttcagcaacaatagcctgtgccaatacagtagcagtagtagtaccgtcaccggcatcgtcaccagtcttggaagctacttctttcaccaactgtgcacccgtattctggtatgcgtcagacagttccacttctttagctacagttacaccgtctttcgtgatgtgaggagcaccgaatttcttttcgataatcacgttacgacctttagggccgagagttactttcactgcatttgccagtgtatcgataccttttttcaattggtcgcgggcatcgatattgaataatatttcttttgccataatgatatttacaatttaaatattttatatactatattaacctaacacagcgagtacgtcactttgacgcataatcagatatttagtgccttcaacttccagttcggtaccagcatacttgccatacaaaacagtgtcgcccaccttcaataccatctcttcatctttcgtaccgtgaccaactgccacaacttcacctttcaaaggtttttcttttgctgtatccggaataatgataccgccaattgttttctcttctgcaggtgcagggagtatcagcactctgtctgccaatggtttaatgttcatagttcttttgttttttatatgttatacatttattatagtaatgtcttgtctcattttagtgagacgcagaacaaattgcgaaaatcgtgccaaacagtaaagcgaaatttctgtcagtattaaactgccaatttggcaaagaataagacaatataccattctttttagagaagataaacggcatctcagcataacttttctatgcaagcatgaaagttatgctttctatttgcattatctttgcaccctcaaaaaacgtttttagaacatgaatgcagtctggattgttttacctattctcacattattaatgtttgagttgggactaacacttgaaattaaagattttaaattatttcgtcaacgtccctatcctgtttttgcaggattgataggacagataatccttttaccaatattggcttttgcattgggttatctgtttcatttggaacctctgttctttatcggcctgatacttattgcttgttctccgggtgggagttcttccaatatattctctatgatagctaaaggtgatgtcgcactttccgtatcactgactgcactcagcagtattattactttgtttactattcctgtcattatggagtttgctacgcaaattgcaggagacaatagtggaataacaatacacctacctgtcggcagcctcattatccagaatctactgctcatgttgctccctatcgcaataggcgttttaaccaaacgcttttgccctaaaacagccgaacggatacacaaagtattatccaaggttgccttccctgccttgattttattagctactgttttcttcatacaacatcacgaaacgatagttgcacagatcggtcgattaggtctgtgcatcacactaatgatattattggctatgggtggaggatatttaatctcccagttaatgaaattgaacaggaaagaacagcgtacgcttatcattgaaataggcatgcaaaatgcagcccaaagtattgctattgcaagtagcccgtttattttcaataatgacataattgccataccggctataatttatgcactgatgatgaatataattctattagtatatgtgggaatagtgaagcggaaataacacaaacttgtaaattaaagtagtatatttttctatattcagacttaaattactacatttgtgagaatcaccatagtaaggtaaacctaaaacaatattaatatgaaaaataaaagtttcctcggactgttgttattctcctgtatctgcttaactgctattgcacaagaaactacaaaaccaattaaggccatttatgtaaacgctgaccagaatactctttttgacaaattgattgacttcgtacagaataatgaatatttcattctatcgctggacaagcaagcaggtttcatacaagcccagaaacctgttgaaataaaaaaagtattcaaaccaaatgaacggagaactttaaattttgtcatcaggcctattaatgagaatttatcgcaaataactttaaatattcgttgcgaagaaaagcactggggaggcagcgaatccggtcatgtctattactacgatgacaaaggtgtcagtcagaatagcgatttataccagaatatatgggatgaactaaagtctgcattagtgccctatcggcaagttatatttacgacagtaacaacgcccgctcccaccaaagcccttcctgctgaaacaacccttaactctctgcctaaagcattcttaaaagacggtttcccattgttggtagaacgttgccgcacagtgcttgcatcagcatacatgacccagaaactactaagcgaacatacagatatccccggttgggaagggtacccggtgaaactctatgaatattacaccgggaaagatataaaaaaaggagtagccaagcgcggactggtatacttgctgaacccaagtgcagaacaacttgccacatggattgccaccacttgctgggaagttaagcaaagtacagataccacatacctgtataaactcgcagaatttatcaaacggcaatcaggggcacaattccctgtacaaggagtagtatacgaggatatgtataccaagaacttctatgaaccatatattttcaaagacggagtaactgtatatgtagcagatagtactaaaatgccgacagataagcattgcaccgatgagcaactggagttttacctgcatatgacaaatgccgacttaaaaccaaacaccggcagatatgcccgcatttgcagtacaaaccgtactcaatattacaaaaatggaggtaaaacagatgtgggagataatgatgaacaccgtaaccagtcatggttgaatgtagttcgccaactttatcaactggcttggctttcagatcgcaacgaattaatgattgcctgggcaaaagaacaactgtaaatagccggtttaaggcataccaatcctattctttttaccccaaaatcccccatacaagaagttaagactttgcatacaagaagttaacttcttgtcaacaaggagttaagttcttatcaacaagctattgacgactgataaataacaaaactaagaaagtttagtcaatatccaagtctgtatcacaactcaattcagtcgaatatccctgccagaagctcttggtagaatgtactaaagcactccccatcaagaataggaatattacggctattaacgtcatcaccataccgatggctgcgtaatacttcggttctaaaacatccataatagttatctttgttaggttagtactacaaagataaccaagatggattacaaagagcttactcttttatgaagtttttatttctttaaagtttgtatcaattcttcggccgaaaccagggtctgttcaccagtctccatattcttgagtgtcaccttattctcgttcatttcattctctcctacaagagctacaaacggaatatttttggcattggcatagcccatctgtttcttcattttagatgaatccgggaagatttccgcacgaataccttctgcacgtacttgggcaagtacattcaaggaaaaagcagcttctttctcaccaaagttgataaatagaagttgcgtactgtttacagcttccttcggataaagatcaagctggttcagcacatcaaagatacggtccgcaccaaaggagatgcctacaccggaaactcctgccataccgaatacaccggtaagattatcatagcgaccaccgcctgtaatactaccgatttgtacatccaatgcttttacttcaaaaatggcaccggtatagtaattcaacccacgggcaagtgtcaaatcaagttccaattcattcttcagaccgaaagccgatagagttttcaggataaattcgctttcttccactcccttttgaccaatttcacttccggcaagtacttctttcagggtagccagtttctcctcgttggtgccgctcagtagaatgataggttgtaatttggcaatagcctcatcgctgatacctttttctttcaactcggcattcacattgtccagacctattttatctagtttatcaatagccacagtgatatccacgatcttatctgcctcaccgataatctccgcaatgcccgtcaaaatcttacggttattgatcttgatgcaaacacggataccaaagcgagtaaatacagtatcgacaatctgcattaattccacctcgttcagtaaagaatcactacctaccacgtcagcatcacattgatagaactcacgataacggcctttttgcggacgatctgcacgccacacaggttgtatctgatagcgtttgaaagggaaagttatttcatcacggtgcatcaccacgtagcgggcaaatggcactgtgagatcataacgcaaacctttttcacagaatttacttgcaagtttggctgcattacggctcagcaattcctcatcggttagtccggagaaataatcacctgagttctgtattttaaacagaagtttatcaccttcttcaccatatttccccatcagtgtggaaagcatttccattgcaggcgtttcaatctgttggaaaccatagagatgatatacatcgcgaatggtattgaatatatagttacgcttcgccatttctaccggcgaaaagtcacgggttcctttaggaatactgggttttgctgccataattgtttcaattactattaaaatcggagggcaaagttacagttttttatcgagataagaaaagggataaggcggttttatataaaacaatacccgttggcggaattaatttctttcttgtaaaggttatgagctaaatgaaaaaaatcagagaatatgtcagcgaagctaattgagatagtattacttatcatttacttcattcctacacgcaaggagctaactccgccaacgagtaaaacaataatcagactggcacatatctgacactccgcacgttgacaccaaatgtttcccctattgaaactaagtgtttctcggtgtgaaacagagtgtttcaagcaatgaaacagagtgtttcccctattgaaacagtcggtgtcacctgctgaaacggaagacagtgtgcgcggagatctttgcgaagtctacgggaaattatccgcatttagagtaaaaaagagttaaaacagcacatttttcgcatagattcgtgtagaaaagttcaattcggtaattatcgggctactcactataaatcaaccagatagatggaaatattgtaaacattcactgcaaaattagtgctggcaaacagtttaccagcactaattttcaggttgccagcacaccttcaaatgccgatcaataaagggtttgaggtacacctgtgcaggagtgctggcaaaaaactcttttgtataattgagctttttgagttcccccttccagacaattagatcaatttatcggacatgttgtatctatagatcggacgcgcagcatctatatatccaacaccacccatatattaatgctgatattttaactcatgcagcgtgcattttgggtaatccgttcttttaatggaatttttgcatgcttcatgaaaagaaatcgtatttttgaagcctgattgaggaaggaaacaatgcaaaaagagtaaagccatgaatattgaagaatatcgggaatattgtttaagcatcaaaggagcaacagaaagtttcccctttggcgaaaatacccttgtctataaaatcatggacaagatgttcacttttgctccattaaatcctaaagatggacgattttgggcagacacaaaatgtgactccaccaagtcgacagaactgatggagctatataatggcattgcattcggcccgttttccgacaagaaacactggattaccatatatctggaaagtgatgtgccggatagccttataaaggaattaatcaatcattcaatagaagaggtaatcaagaaattacctaaaaagaaacaacaggaatatcgcagtactttgggaataaaagatgaaaattaatacagaatgagatatggaatgagcatgcttgataatctccattatattcaaaacaatggagaaaaaactttcttagcaaatcagaataaaaaatatgcctgtcctgaatgtaataagccaagaactgtacactacgattattgtatttattgcaaacaggagaaaagatagaatgaaataaaatagaagcctcccaacctcctcctcacccgcaagaaaattaaaagattcttacaccaaaatcgtaattaaatgcgtttattccaattcccgcttttcagatacagataggaaagcagcagcaacatacccccgtaaatatattcacttgtccacgctatagcgacatccacttgcaggtacataaccataacaaccacataaacaacataaatggaaatggttatcaacatgattttcatagatcggtttgtatttcctgtgccggaaacagcattaaacagcaccagtccgggagctgaaaggagatatcctaataacatgatgtacatagtaggtaatgctgcctgtaccaactcctgactattggtatatatctgcaataacacggtagggaacaaagcggacagcaataggaacggtatacctatcatataagttaatcgtatggcacgtttacaggcaagccagatttcactcttctcttttccactccctaatagattacttaccatagaactggtagtatcggaaaaagcaaaaatagccataaagaagcaagtattgatactcctcatgatattggctatcgccaaaggacgctctcccaaatgttcgatagcaatgaaaaacaagaaccattgtgaaggaaacaatatggactgaagcatggtccaacatgagatattccaaatgcgtttaaattcggacagtttgaaactaaactgttggaataaagcatattttttcttatccactttcagccaagtgtatgccacataaaacagtaacgataccaactctgccagcgaagaacctattgccgcacctgcaatacccaaagccggaaaaccgaattttccaaatatcaaaatgtaattgaaaacaatattactgagcaccattactatagagttaagcgtaagagtgcgcgtctcagtgatgccaatgtagagagcccggaacagaattgcaataaaggaaaagaaaagcccgtacctcctccactccaaataagaagaagcagcggcataaacctgatcggaagatatcagacggctgagaatatgtgttgtaatagagtcacacaagaaaaacatgaaggctgccaatgccaacaagaaaaaggcaccttgcatgaatattccacctatttcgccatacttccgctcgccatttttacgcgcaatcagaatttgaacaccgatgctgaatccaaaaccgagcatataaatagccatatacaacactcccgccaacgcggatgctcccaactccacttcacctacgtgacctaaaaaagctgtatccgtaacatttatcatgtgctccatcagtaaactgataagaataggatacgctattagccaaatttgcttataactgaaattcatagataaagtcgattaccaccaattatgatctgtcattcaggtgaataatatgacaagacaaaaaggtgtgccaaaataggaaaagtgaacgtaaattacgcgaattacgcgaatcacgcaaataagtagttcattaatcattgattttcaataacatgaatcttatattatttgtgcaatttgcgtaatttgtgttctaaacttcattttgacataccttctctacttatgtcagaagtcaaacttctccaacttcatggaagccagtccctgtattttgggaaccaatgtaacaaaatgttctgctttttcatgagcagacagcgattccgcatcttcccaggtttcgcaaatcatcaggacatcattacgggtagcgctttcgaaaatatcataggcaatacaacctttgtctttcaaagaagatgccaccagctcttttgcaacttccaacaccgcagcacggttactttcacttacttgaataaaaacattcagtctaatcataatttgtacaatttaaaagtgtgctgcaaatgtaaacagaaaaatcagaaatgctgattatttatctgcataaataccgacgcggtttccctccgtatcaacaaatacagcgaaatatcccctaccctctgcctcaatctttgttttgggaataacgacttttccgccttttttcaaaattgtttcaagagtaggctcaatctcatctacattgaaatgaatgagcacccctttttcagaaggaaggaaatcagaagcataagaaactgctccgacaaattcatccccttcagtgaaaaatgccatcttctcttcctcacattcgcaagtcggaagtttcatattcaacacggtttcataaaaatcgattgcccgacggaaatcagcagctggaatttcaaaaaatgcaattagttttttcattttgttttcttttcatgattattactatgcctttgcaaagacaatgcaaaaatagggcaagccggcaaccctcaatagaagaaaacagacatctttaaagagtggaaaaataatcggagacaggagcacagacagataggtattcggcaggggtatagccggagaagagtttaaactccttgatcatgtgagattggtcggaaaagccacactcataagctacctgggcaaaaggcaaagccggatcttgttgcaaagtataaagagcacgctgcatgcgcacaatacgaaggaattctttaggagtagtacctatataatcagcaaatatacggccaaactgcttggaactgaggcaggctatatcagaaagctctaatgtgctgacttgcggatggaggtttatttcatgcaaaacagtagagagtcttttcagattgtattcagaacaggaaaccaaacggtggaagaagaagtcttcaatcaagtggatacattggtcattatccgtagtatccacgattctccgggataaatcagagagttccatatcttccacttcatccgtagagatactttgcccgaagaaaagatgcagcgggattcgcaggaaagtctttgccgcatagggctggaaaaccactgttatcatttcaatcattcccgtcgacataacgtcggaaaagccgaaagactgaccgcaaataaaagattgtggttgtaattgtgaattttgcaatgataataattgcctacccttatgaaacatcagttgcatacagccaacaggcaatgtccgttccgacacaggagtaagagcatcatcccgtaatatccaataataacggatataaggggataaggtgggagcaggttttacgatacgaaaagtttgcatacgacaaatatatgatatatctcatgaattgcggcaaaagtagacaaaaggaatggggagaaatagtaaaaaagagacattccctacttattattcaccccatagccaaacaaagcaaaatcaccgaaacagggatcatccggaaagacttccgctaatgcggcagttatcctttgcgcatttttcaaggaaaaagtttccgtctcggtaagttccagcaatcgggctacgcgacagacatgcgtatccaaagggatgattaaatccctgcaatcaaaactttcccaaattccaaagtcaacttccggccctttacgtatcatccagcgaagaaacatattcagcttcttctgaggactgcgggaagatacttccagaaaagcacagagtttctctattggcagtccggaatacacttggagcgcctcttccaaactttcaaaacgggaataagcagcatacaagcgttcaaagtaagaatagaaatcggcatacgaaagcatccggtagaagctacgtttttcctcagcaggaaaatccttctcccaacaacgggaaagtacatattgataaggagaagtccccatacaaccgtgtaattcatcggccttcttcagaatctgcttgcgattgccgaaactcataatagcagtcagcagaccgctgatttctatatcctgtttctgccggtaacgatgcgggaattgtaccggatcattttgaataaaatccgcacaatgataggtctttgcccactcctgtagtttcttttttatatctttggtcatttctttaaaatcatggggggtacaaagatattgaatttatagcaactttggacaagtcccctattctatttacccttatttttgcatcgtgaaattcaaagaagaacttatggaacatagcaagaagaccacgcgtgaagagtatcagaaatgcgtaaatgcagtagtagattacatcaacctccatcttggagaagagattgatctgaaatcattggccaagatttctcatttctctccgttctacttccatcgcatcatgaaagcatttctgggcgagccaatcgggacgttcatagtccggacacgaacagaatctgccgcccgcctgttgcgttactcggatttgcctattgcagatatcgcttatcgcatcggctattcctcaccatcgtcactgtcgaaagtattcaagcagttctatggaatttcacctaatgagtatcgtaacaataaaaattttgtaattatgaaaccagcaattatcagacccgatttagagttaaagaaagaaataagagaagtgcctgccagaaatgtaatttatatccgcctgttcggagactataaaatgaatgattacggaggcacatggatgcgtttgttccaattcatcaaagaagaaaaactgccgatgggtgacatggccccttattgcatgtaccacgatgaccccaaagtgacgcctgccgacaagttgcgtaccgatgtttgcatggtgatgcctgtaaccgtaactcccaaaggtgatgtcggcttcaagcaattgcctgccggacgttatgcagtgtttacctacaaaggatcttatgagtatctgcaaagtgtatacgacacgatttacggaaagttcattcccgaaatggaatgtacaatgagagacgagtcgagtgccgaacgctatctgaatgatccgtgcaatacgaaaccggaggatttgttgacagaaatcttcattccggtagaataatcatcttatatattgcgggcaaatagtctttgtccgcaatatataactattactttatctctcttttcatcggcacatacttcagtccattcgtaatctgtggttcctttacctgctcaaatcccagacttttgtagaaaggcactgcatacgtagaggaatttacagtcatttccggcacagaagtctcttcgataaaagcatcgaataatcttctgcctatacctttccggtgatattcctcccgtatgaaaaacagggaaatatgtttcccttcatctttgactgccatcacacccacaagtcttgcctcatcaaatgcaccataaatgaccaagctgtttatcatcgcctcatcattgacgaaacttttgaaagtttccaatccttgttcatcaaaatcctcttcacccgtctgaagatatatttccaaagaaagagatgcggcctctttatattcagataagtctaatcttcgaacgcttatccctggggttaaactcaaagtattcataatagttaagttactgttcgcaacaaagatatcaaatttctggaaatgatgattaagacattcccattattccatccggaaacactatctttgtacaggacatttaactaacccaactttattcaaagatatggaaagacttatcgacaaatatcttccggcagattatcatgatacattcgttttgaaatccagaaagcctgcagaacagataattcccaaagaactaatcaaaaaaatattcaatcactccccggcgtggctcagtgttttaatgaaagtcaggaatattctggtaaaacctttggggcttgaaaccggaaaagtgttgaaaacagaagattgtataatagaagatacggaaaatgaggctatcatgaagaaagatgataagcacttattgttttatgtctccattgccaagataggaaacgacctgatagatataacaaccgtggttcaatatcataatgcattaggaaaggcttatttcttctttattaagcctttccataaaatgattgtgccacgtatagcgaaagaacttatataatgcctaatccgtagctactgatctcctcaaagtcctcatcagcatatgagttcttctgacgggcatcttgtactattttcagaaatccttctgttttagacaggaaatccttgaatttctctgattcttcctcatgtccctttactaccggtagtttctctgccgcatccagttgaagtcgcagttccataatctttaaatccaggcgggatttatcttcaacatgcttacgggcatacaaattgatgatgctctgcatagtcgtactcatgcttttcattgcaatgatctgctctttcactggattttctgccaaaagaacccgctgggcatttgaagcaatcgggctcaatatatcaaatatattctgcttacattcagacattaccacgctcaattcatagttatcattcagcaaatcagccatcccttcggtctttttttctttcaagagagacaagtatttattgaaattagcatagaactgatttctcgactgaaaaagctccgcataattctgtatcaggttctgtctgacatctgcaccgaagcattcacccggtagcatcacctccgcagaatcttttttcgaaatgacgggagacatgatgtatgaaaacatgggtacttccgtcttttgttccatataacccaatactgcatttacatccctctcctttaccacatttttcaacagagccaatgaggcgtcgtcgtatttcatcacctgccccgcatttgctatttcttcaggagtataagtcaccgtttctttcttgctacctacacatgaggcaagcatcaggacgcttacccatacacttaagactaataaattctttcccataagatttttattttaaagtgaacaccaaccagatttaaccggcattgtgctaataacaatataaaagcgattttgctctcaattatagtttttttcacctttgcaatttgtacttttgcaccggatttcaaattcgatctataatttcaatcagaactatggacaacataaaaggctatatatacgcggcagcttcttcttcaacatttggattggcaccttttttcaccatatccctgctatcctcaggtttttcttccttcgaagtattagcctatcggtggggagtcgcatcatttgcactaatcatattcggcatctttttaggtgaaacattctgtatcaaccggaaggatttcggaacagtgttcatattgagtcttttccgtgccgcaacctcattgagtctggtcatcgcataccagcacatagccagcggagtagcatcaaccatccacttcatgtatccattggctgttgcccttgccatgatgttcttcttccgggaaaaaaagtcattctcaattctgtttgctgtagtgatttcgctgataggagcagcattgctatcatcgggagagattgactttaaaggtggcaatacaaccataggattgatcgctgcgatatgctccgttttcttttacggcggatacattatcggagtacgcaagagccgtgctgtaaacattccatctacagcactgactgcctatgttatggggctgggagccttattctttattataggaggatgtctgacgagcggtatccacctaaccacagacggatatgcatggctgaatattctcggattggcactgcccgcaacagccatttcaaatataactttggtaaaggctattaaatacatcggacccactctaacctccatcttcggagccttggaaccacttactgccgtagccatcggatgctgggtattcaaagaaaatttcacggtgcacagtgctttaggcattctactgatactgtcagcagtgacggtagtggtgtggcatgaaaagaaaacagaaagaaaataaggattatttgctcttcttataatcagtaatgaaaccttccatcatccacttcgccaatgcctgacgattggaactcataacaaaccggcgctggtcgaaagtattctgaatattgcccaactctacaaacactccggcaggactggaattggccagcacatacaaattgcgtgggctgacagttcccgaaaagccacggttaggttggtggcggtcgtatttagattcgaaagtattcttcattgtagttgccaaccgtttaccatttacacttttgggagcatgatagaagaatacatccgtctggtgacttttactacggctatctacatgcaagaagatggaacggcaatacgtataactcttgcggtctttctgatagagcgcatttattttctcacagcgttggcgaaggcgggcaacctggttcagagggataggagcacccatacaagtttcacgcttactgttattaaggtattgatcgtcacggataccgtctttggcatcctgaataataatataaactttagcgccttcctccatcagattccgggcaagacgaagagcgacatcataagcatattcatcctcatgcagttccacgcttcctatcctgccaatagcaccgggatcagggccaccatgcccactcaccacgtagaaacacgcacctttgaggcggtttcccgtcactttaacttcagcaaggctttttccgaaaagaggttcgcgaattgttttgttgccggaacgggcagaagaatttgaagaagaagagtttgaagcagatgaattggatgaagcaaccgtattgccactccccttttttagaggtggaagcaaatatttcactcccagccgcagctcttctttacctcgcaattgtttcttattcagttccaggaactcctgatagtacgcttttccggtacgcccgttacgctgtagaaaaccagatattccctcaccgcttttcggcgtagcccgctcttcctgggccaacgcttcgtaagagaatgacatgcaaaaaagcaaaataagaaagcaaaataactgtttcattttccatttattcatcttgcggacaaaaatacaattattttccctacttttgcgtccacaaatgcgttaattgataaaaaactataaaaacaaatagcattatggcaaagcaatttaaaccggaaaccctctgcgtacaggcaggatggactcctaagaagggcgagccccgtgtactccccatttatcaaagcaccactttcaaatatgaaaccagcgagcaaatggcacgccttttcgatcttgaagagagcggttatttctatactcgcttgcaaaaccctaccaacgacgctgttgccgccaagatagctgctcttgaaggcggtgttgccggtatgctgacgtccagcggacaagctgccaatttctatgctatatttaatatctgccaggcaggcgatcacttcgtttgttcgtccgctatctatggtggtacattcaatctcttcggggtgactatgaagaaattgggtatcgaagttactttcgttagtccggatgccagcgaagaagaaatctccgcagctttccgcccgaatacgaaagcattattcggtgaaaccatttccaacccgtcactggaagtattggatattgaaaaatttgcccgcattgcccatagtcacggtgtacctttgattgtagacaacaccttcccgactcctatcaactgccgcccgtttgaatggggtgctgatatcgtagtacactctactaccaaatatatggatggtcatgccaccagcgtaggtggttgtattgtagacagcggcaatttcgactgggatgcacacgctgataaattccccggactatgcacaccggatgagtcataccacggactgacttatacaaaagctttcggtaagatggcttatatcactaaggctactgcccagttgatgcgtgacctcggcagcatccagtctccgcagaactctttcctgctgaatctcggtctggaaactctgcacctgcgtatgccgcaacactgtaaaaatgcacaggcggttgccgaatatctttctaaaaatgacaaagtagcttgggtgaactattgcggtcttcccgacaataaatactatgaattggcacaaaagtatatgccgaacggttcttgcggtgttatctccttcggattgaaaggggggcgtgaggtttccatcaagttcatggactcactgcaattggttgctatcgtaacacacgttgccgatgcacgtacctgtgtgctgcaccctgccagccatacccatcgtcagttatcggatgagcagttactggaagccggagtacgtcccgacctaatccgtttatcggtaggtatcgaaaacgtagacgatatcatcgcagatattgagcaggctctgaacgcataatttcataaagtacctataaaacaaataatatatccccgtctccgcaaccggagtacggggattttcttatctttgcacccagtaaacatttaataaagaaagatttatgaaacgtacaaaattagctgcatcctttttgttggtcgcaactctattcctgacgggatgtgtgaccaagaaggaatttgtgaatcttcaaacagattataacaaactgaaagacgaaaagtctgctctcgacaagtcatatcaggacgcacaaatccagcttgccgaataccgcacacaatctaaaagcttggaggatcgtctaagcgaagcccgaaaaaataatcaggagttgcgtaacagttacgctaccctgcaaggatcgctcgacaagagcctccagcagaactcgcaagggaatatcaacatctccaaactcgtagatgaaatcaatgcctccaaccgctacatcaagcaattagtggatgccaagagtaagtcggactcactgaacgttatgctaaccaacaatcttacccgctccctgagccgcgaggaattgaaagaagtagatgtgaaagtactgaaaggtgtggtttacatctctttagcagacaatatgctctacaagagcggcagttacgaaatcaacgaacgtgccggcgaaacgttaagcaagattgccaagattatcaccgactacaaagattacgaagtactggtagagggtaatacggacaacgtacccatctcacgtaccaatatccgcaataactgggatttgagtgccctgcgtgcctcatctgtagtacaagaattgcagaataaatatggtgttgaccctaaacggctttctgctgccggacgtggtgagtacaatcctatcacagacaatgattctgaactgggtaaacagcgcaaccgccgtacacaaatcattgttacacctcgactcgaccagttcctggagttgatagataaggctccggaagctgaaggagaagcggctacggaataaaagaaaaaccatctactgctgtattttcacaggtagaggcatttaaagcagtctatactcagactattttataaacaataaggcgagaggctttccagtccttcgccttattgtttgtttccaccctcatccttgctttgacttccgacagattaagtactatttaatagtttttattgcacacagacttacactttatcacatttattcctacctttgcggcaaaattataacttttaactaacaactcataatcaactaccatggctaagataactaaagaagctgccttgctgtatcactcacaaggcaaaccaggtaagatagaagtagtgcctaccaagccctacagtacccaaaccgatctttcacttgcttactctcccggtgtggcggagccgtgcctcgaaatagaaaagaatccgcaggatgcttataaatatacagcgaaaggaaacttggttgctgtaatctccaacggtactgccgtactcggtcttggcgacataggtgcgttgagcggtaagcccgtaatggaaggtaaaggacttctgttcaaaatttatgccggcatcgacgtattcgatattgaagtaaacgaaaaagatcccgaaaaattcatcgaagctgtaaaggccattgctcctaccttcggtggcatcaacctggaagatatcaaagcacctgagtgcttcgaaatagaacgtcgcctgaaagaagagctcgatatccctgtgatgcacgatgaccagcatggtacggccatcatctccagtgccggacttgtgaacgctttgcaggtagcaggcaagaaaattgaagatgtaaaaatcgttgtgaatggtgccggtgcatctgccgtatcttgtacaaaactgtatgtttcactgggtgcccgcctggaaaacatcgtgatgctggatagtaaaggtgtaatcagcaaagcacgtactgatcttaacgaacagaaacgctacttcgctaccgaccgcacagatatccacacactggaagaagccatcaaaggtgctgatgtattcctgggattatccaaaggaaacgttctgtcacaggacatggtacgtagcatggccccgtctcctatcgttttcgcactagctaaccctacaccggaaatctcttacgaagatgctatgtcagcacgtcccgacgtactaatggcaaccggacggtcggactatccgaaccagattaataatgtaatcggtttcccctatatcttccgtggtgccctggatactcaggctaaagccatcaacgaagaaatgaagattgccgccgtacatgccattgccaacttggcaaaacagcctgtacccgatgttgtgaacgaggcttatcatgttaacaactttagtttcggtccggaatacttcatcccgaaaccggttgacccgcgtcttatcactgaagtttcctgcgccgtagccaaggctgctatggaaagcggtgtagcccgtaaaaatatcgaggactgggatgcttactgcgtacagctccgcgaactgatgggttacgaaagcaaactgacccgccagctttacgacaccgcccgtcgcaatccgcaacgcgtggtatttgccgaaggttctcaccccaatatgctgaaagccgctgtagaagccaaagccgaaggtatctgtcatccaattgtattaggtaacgatgaaaccatcgaaaaactggcaaaagaactcgacctcagcctggaaggcatcgaaatcgtcaacctgcgccatccgaacgaagcctcacgccgtgaacgctacgcccgcatcctttccgaaaagcgtgcccgtcaaggtgctacctatgaggaagccaacgataagatgttcgaacgcaattacttcggtatgatgatggtggaaacaggcgatgcagatgcattcatcaccggtctttataccaaatacagcaatacgatcaaagttgccaaagaagttatcggcatacaaccgcaatacaagcatttcggtacgatgcacatcctgaactccaagaaaggtacctacttcctggctgatacactgattaaccgtcatcccaatgccgaaacattgattgacatagccaaactgtcagagcataccgtacgtttcttcaaccatactccggtaatggccatgttaagttactccaacttcggtgcagacaccgaaggtagtccggtaagtgtacatgaagccgtggaatatatgcagcagaactaccccgatcttgccattgacggtgaaatgcaggtgaactttgccatggaccgcaagatgcgtgacgccaagtatccattcacccgtctgaaaggtaaagatgtgaatacccttgtatttccgaacctcagttctgccaactctgcatacaaactgttgcaggccatgaatacggaaatggagctaatcggcccgatacaaatgggattgaataagcctatccacttcaccgacttcgaaagctccgtacgcgacattgtgaacatcaccgcagtagcagtcatcgacgccatcgtggataaaaagaaagcaggtaaatgagacgcccgttatcgaaatcgcaaagtgtttgcatagtgttgctttgggcagcactttgctacatagttctaacaactgccgaacgaattgacggtccagtcattatgacacttgtcatttcggcagcgttagtattcattccggtaataaaatcattaaagagaggataaataatatctttttattcctttttacgggataaaacaatatttttgttgttttatcccgcattttctttataaattgtttgtttgtctcatttttatgtgtacttttgcaaccgcaatagagaaaaaacaatctaaagaatactttgttaagacaattatatttagtagcaaccaataaaagaaatagattatgaatgcagctaaggtattagaagatttgaaaagacggttccccaacgaaccagagtatcatcaagcagtggaagaagtactttctacaattgaagaagagtacaacaaacacccggaatttgacaaagtcaatctaattgagcgtctttgcatccctgatcgtgtttatcaattccgcgtgacttggatggacgataagggtaacatccagacaaacatgggttatcgcgttcaacacaacaacgctatcggtccgtacaaaggtggtatccgtttccacgcatctgtgaacctctcaatcctgaagttcctcgcgttcgaacaaaccttcaaaaactctctgactactctgcctatgggtggtggtaaaggtggttccgacttctctccgcgtggcaagtctaatgctgaagtaatgcgtttcgtacaagcattcatgctggaactgtggcgtcatattggtcctgagactgacgttcctgccggtgacatcggtgtaggtggtcgtgaagtaggtttcatgttcggtatgtacaagaagctgactcatgaattcacaggtacattcactggtaaaggtcgcgaattcggtggttcactgattcgtcctgaggctacaggttacggtaacatctacttcctgatggaaatgctgaaatctaaaggtactgacctgaaaggcaagacttgcctgatctccggttctggtaacgtagctcaatacactgctgaaaaagtattggaactgggtggtaaagtactcaccatgtctgactctgacggttatgtttacgacccggcaggtatcgatcgcgaaaaactggactacatcatggaactgaagaatctctaccgtggacgtatccgcgagtatgcagaacaatatccgggtgtgaaatatgtagaaggagctaagccttggggtgaaaaagctgacatcgctctaccttctgcaactcagaacgaactgaacggtgaccatgctcgccaattagttgccaatggtgtaatggcagtatccgaaggtgctaacatgccttctactccggaagctatcaaagtattccaggatgctaagattctgtatgctccgggtaaggcagccaatgcaggtggtgtatcagtatccggtctggaaatgactcagaactctatcaaactgagctggagcgcagaagaagtagacgagaaactgaagagcatcatgaagaacattcacgaagcttgcgtacagtatggtactgaagctgacggttatgtgaactacgtgaagggtgctaacgttgccggattcatgaaggtagccaaggccatgatggcacaaggtattgtgtaagaagctatagttgttatatatgggaatcccctttgcactcggtgtggaggggattctctttttctcatatcctctatatatcttaaacacaattctgacctcgcccacattagcgcccagcttttcccaaaatcgtttcagacaacttatttatcatattcctgatttctttcgaattaaaaggtaatccaactaatgtaattttattccggatatttgtgtaaccactaattgcagataatggaatagacttaaatttattacacggatatagaatcataacatccttattctttgctaagtcgaaagcactgtatgccaacacttgatgtaaatcctggcgaaacgaatctctcaggccatttgtcgacgctgaggtattaaacatatgagctttatatttggcatcaatggtacaaatatatccctccttaaccagaagaatgtctggttccagatatcttaatgcccaagcaggattatttccggaaatgtgatagcgggcattagattctgttttagcaccaagcttcttaccaacctcctgcactatatattgtgcaaaacgttcgaacaattctgctgaatctatcctccaggaaaatttatttctagacttgtggttcaacagtttattcgcttgaattttcaaatcttttattgctattggatcaaagtcatgaatcataaaagcttcagtcgtagactcacaattatgactagccgaatacaatcgtaacttatcaaccagagttttcgtcttaaatttaattgatataggtgtaagtggtgtctggaagagctcgattgccagttttaatatataagtcaatttataccattctaaatgattttttgattgtatattctttcgattttcaaatttgaaagtattcataggattgtatgaactattagcatactttgtccaatttgtcgatgaagcaggaacatcctcaactcgtttgattgtatcgaacttattccaaatacattgcatcgcattattgaaagaattaaaatagttaatacaatccaagtacacaggagctctcatttcactactgctcactaatatcatgtcatcgtattccggttctaaggtgctttgtaataaattagctatatctgcaatatcctcaccaaatcgagatgtaacaacaaaatccagataatatttaccattgaagggagtacgtaatggggcacatccaacaaacttactcgaagaaaaagcaagtcctacgtgaccttctctttcctgaatagctacactaacacctaggaacgaaaaagtcttgtgattaagagtgataaatctctgaagcgcctgctcgggataacgtttatcacatcttttattcttattcaattctgtaaaggtgataaagcgctcggacaagcattgcatctgaatatttgccattacttgtataaaggtttgtgaatttcttgataaaagagatcgctgaaatctgttctagcactcgataacaaaccttcgtcaaaatattctttcattaaaggcatcaattcatattctattttggcgttaagttcttctcgattgtctgcaatgaagtaagaaccaccaggctgaagatttagttcagaatcagatgcatgcttttcaaacaatcgagctatcttatcaaaaagttccttgccctcaccttcaccaaaaaatctaggttcgatagtgtaccacgcaaagcgacgacgcaaagcgaaatcgacaaccgcaatacttctatcggctgtattcatagtggcaacaacgtgcaaattttctggaattttattcaatggtgcatcacctagagattctatccttataccctggccagccacacattgtctcttgggttcaaagagataaaacacaggccccaacacatttgaaaggtttgcgcgattaatctcatcgactatgagaagtactttcttatttggattgtttatggcacattttattgcttcaacgagtattccctcttttcgttcataaacaacgttgtttgtaataccaagtttcggcattattccttctaccaaatccgaatatgaagtttctgcatggaattgaattaaaaatacttcattatacttttccttgccgatcttttctgccaagtatgttttgccagttccgggagcaccttgtaagattacaaattttctacttcccaaaagattgacaacttctatttcctgctgcacctgatttttttccggctgacgacagttactaatgaattgttctacatttttccgctgaggcttagtagacgcccagccccgcaattctgcatattgcgcaatccaagcacgtacataatccatatcttctttcttctcaatatctatcagacaccctatcgagagtactgatttatatttttccagatttactccagaatcgactattgtatcaccaaaagcaatagcagtttcaatgtctgtaaaatcaggcttacagaaagagctatagcaagattcctgaggcaagatctttagaaacattcgtcttgtccctggttgactagccaactgataatcattccgaaatccctctgaaccaaccccaagagacattacatataaattgctatctatagttgtagggaagaatacaagagaaaaatctgaatatgggcctgataattgctcttctggacgaataaatccaaaataaggaatattgccaacgtcgtatgatatattctttctgattactacattcttctttttcttgtttgccccattttctaccatgccaaggctctgagcaaactcaatggctttttcgagaaagtcttttgttttcatattatagaaaaaattacttaagatcagtaaggtttcttgaaacatttcatgtgttcatcgaacgcaaatatatcgattattcaagaactgacaaaagaagctatcagatttcgcatgcttttccaaagataatctctatcctagcaataatagctttattctttctctttcctattatattagttttatgcattcctaatactcttgctacataaatctattctcttattgcctaattattattcttacaacaattattgtaagaaaaatatataactatagtaagaaaataacataactgttgtaagaaacttctatatttgtagtaagaatactttttagtataaacgatattagtctgtaacacatccgacattaacctctcgcagttccagtaccaatttgtttctacgaaaacataaacctcttaaaaacaatgtatatatgagtacttattatgacctttacgaaacaccggaccccagtggcgaaggtaagaagaaaccactccatgcacgcgtccgctccaaaggcactatcactgcaaaggagtttcaggagcggttaatgaaagaacagcacatgccacacgccatggtcgtgggaattatgcaagccatcagcaatgcactgggcgactggctcgccgaaggttacaatgtagaactggatgaactgggatttttcagtactacactgaaatgtacgcgtcctgccatacagaaaaaggacatacgtgctgaatccgtacgctttgaaacggtaaaattccgccccagcaaagccttcaaaaagtacgtgagacatcaaatggaactggagagaatagacaaaaaagcctcggcaaagaaaccggcagttgccaaaaaagatagaagacagatgatgctgacctttctggaagcaaatgtctgcatcacacgcgccgaatatgcccgactcacgcacgtaacggacagatgcgccagctctgatttacaggaatttctgacagaaggtgttatccgcaagcgaggtggagggcgttcagtggtttatataaaacatcaggtatagtgtatcgcttttcgtaaggcatctgctctgtatcgggcaggtgccatacctgtatttcttttaaaaaacttcccaaatgtagattgatccggaaaattcagttcaatcgctacctgactgacattcatatccggtcggcgcagcaggagttttgcttctgtcaccacggcatttgtgatccatttcagtgcagattgctcgtcacactcccgtattatcttcgatagataatccggagtaacacacaattcctgcgcataaaatccgacatcacgatgtttacggcaatttcccaaaagcaattcgtggaaacgctgccgaattatttcattacgcgaaaatgagatttctctttctccatatttcttccaacggctattggttatatcgagcaatagatttatcacctcatttttaataacagtggcccgatacagatgatccgagtccgctatatacttctttatacgttctatccgattcagcacaattgcacattcatcatcggtcaaactctgttctggatatagacgtttcaagtttcctgcttccggcaaacgtatgctggaagttaatgacatgatttcctgcttcagttccggtgaaaacaaaagcaagtatcccctgaaaccgggagtatgcgatacatttcctattatattatcagccagtagctgcatcacggtacttcttttaagagtataaggcagataatccacttcaatttgcatttcacctgacacgaccaatattaatgaggaggcttcaagctgcatgggatacctcccaaccttatcttcttttgtcatcgaatcgttcaagtcgataaccaccaactgctcctgaaaggaggattgaggattcattctttcaagataatcctgaaaacttaaatcaagtactgtacctttcatcacaattctgataaatgactaattttaaaatgcaaatttaataattattcttattacaaacagatacatttcggattatgactaattatagtagtcaaatgaccttgtcaattcatctattctgtccgacctttgcatcacagaaaaaacttaatatttaaggaatatggaatatttaaacttatcgaaagagaaaacaagcaacttcatgctttcgcgcataggcttgggaagtatgagaatgggagatgtaaatgaaggtatcaacacgatacatacagctttggacggaggggttaatttcctgaataccgcagacttctacgggaacggacaaagtgaaatgctgataaaagaggcattgaagacccgcaagcgggaagatgtctttatctctgtaaagtttggagccatgcagggcgtggatggcagaatgtacggaatggatgctcgcccggaagttgtggaaaactacctgcgttatacactaagccgtttaggtactgactatgtggatttataccaacccgcccgcatcaatccacatatacccgtagaagacaccatcggcgctatatccgatctggctacaaaaggatatgtgaaaaatataggaatctccgaagtaaatggagagatacttcgcagagcaaatgcagtacacccgatcagtctggtcgaagtaagatattcgttggcagaccggcatatagaagatgaccttttaccgacagcaagagaattaggtgtcggcattgtagccttcggcgtactcctttcgggactgattggcggaagttcacaagaagaaaaattaaaatctatcggtcagagaatttctccggaagcattggcaacgatgaaagcaaatcttgttcgcaccgatgcgctgaaacagattgcagttgaaaaaggagctaccctggcacaacttgccatagcctgggtcttggcgcaaggtgaagatatcatagccttggtaggttcaagaacagcctcacaaatcaaagacacgattcaagcattaaatgtgaaactaacgaaagaggatctggacagaatagaccggattatgccgaaagaagaggcaaccagttcatacatgttggatgtggatattgattccaaaggattattccatgccaaacagtagcattatttagcgaggaaactcagatgagagtgcctcgtaaaccgccggatggaggaagtaacgaacatcttttccttcctccatcgcccgacgaataaaggtagaactgatttcaaaagtaggcgaagaagctacttttacattctccgaaagggaatcgaaagaaaccggataaccgggacggggatatacaagaatatggttttcggcaagaatacgttccgactgataccagcggggaaaaagcgtccagttgtctgaaccgataatcaaatgaaattcccggtcaggataggtttctttcagtttatccaatgtatggatggtataggacggacgggacagattaaactcaatatcagaagctttaaacttgggataccccgcaatggcaagttgaaccaacttcaaacggaaggtatcatccatcaattcatcttcttccttcaacggattatgaggggttacgagaaaccacacttcatccagcccttcatattcgcaaagataattggcaagggcaagatgtccgatgtgaaccggattgaaggagccgctgaagatacccgttttcattcttttgttttcatacgtttccagcaagtataaacattgatgcaacttgaaagcaataccaatgtcataccaagaactattgtccattggctataatacaacgccatcagacctgacaccaaagatataagtgccaggagtgtgttgagaatcaacaatgacttgttctgtttaggagaaacaggtttcggctgatacatgacagaccttattatttcgataaaaactctgtaattacctgcaaagcttctgccttagcctgctccaagtcatcatttacaatgaccttatcgaatttaggggcaaaggtcagttcatattccgccttagcaacgcgggcttctatcacttcgggagcatccgttccacgtcctaccagacgtttacgaagttcctctaccgaaggaggctgaataaatactgacagagcacggtcgccataaaacttctttatattgcagccacctacaacgtccacatcaaaaaccacattttgtccggcagccaactgagcttctacctgagacttcaatgtaccgtagtaacggtctttgtacacttcttcatattccagaaactcgtcattggcaatgcgggtacggaattcttcgggggaaagaaagaagtactccactccatgctgttctgttccgcgtggcggacgactagtagcagaacaagaaaaagccagattcaggttctgccccaataaatagttgataatggttgatttccctgacccagaaggggctgagaatataataagtttagccaacataacatttacaatttagcaaagtacaatgtacaatttagtaaattacaatatacaaattaaaggaaaaacttgatgagaggtacaatttagcaaagtacaatctaaagaaaagcacaatccggcgcacacctcaatacggcaaattgtacattgtaaattgtacattgcaaatgtctctacatcacgttcaatacctgttctttgatttgttccagctcatccttcatctgcactacaatcttctgcatctcagcatgattggacttgcttcccaacgtattgatttcacgtcccatttcctgggcaatgaaacccaatttcttaccttgcccgcttccatcctccatagtattaatgaagtatttcaagtggttgctcaggcgttgtttttcttcgtttatatccagtttctcaatgtaatagatgagttcctgttccagacggttcttgtcatagtccacgctgatggtcttttccaaagcatccgtgatgcgttctttgattttctctacacgctctttttcgtacggatcaacagaagtcagcaacttggcaatattagaaatcttttcgcggaacttcttctctaaagccgcgccttcctgtatacggaaatcaaccagattttggatagcttgaagcacagtggcatgaacagctttccattcttcctcgcttagttcctgaatatcgttcttggtcatcacgtccggcatgcggagcaaagtagagaaccagtcttcgggtgcagggataccggtagtttcggaaatggtacgaatccgttcgtaatacgccactaccacatcctgattaatgggagtaataagttcacaggcatcttttttatcaatccacagactgaaatccactttaccacgttccagtgccttagcaatttcgttacggatttctatttctttttcccggtagaggggagcgatgcgggttgacagatccatcgctttactattgagcgatttgatttctacattgattttcttatcggacagttcagcggtcgctttaccgtatccggtcatggattgtatcataagattctttagttttccgcaaaattacatgaatattttcattagtgaaaattattcaagaaataagtgatgtgtttatcgcttactctttactccaaatacgtgtgttcaagtttagttcatctacaatttccagtaaggattggagcactgcaaagtccgatttaaggatgctcatatcgttcaaagaactccacacatctgcttcaaaccggttctttgaatccggaatggcgaccaaaatcgtagaatcccggaaactgatggtaattcctttcttaaaattgctgtccaacttcaacattctttccatcatggaaggggtaatcagatagcgggcctcaatctggttcgtggaaaagacatcaaagactttttcaaaatcgggattttccattttcactcttgaagctcccatcttaattttgaaaaagctgtcccgcaaaacggtcgtttcgccctgaaattctttatgaaagtcagcaatgaaaagaaatcctttgaaaatatcttcccaataatactgtactccattcttggtagaacgagccctgcgctcttcggcatgtacttcggaacagataaagctggttttatccagacatccttctatcagatcttcggcatgataacggtcgggagaagtaaatagtccgctatttctaaaaagatcctcactcactccgtcattcggagaataggtcgcattcggacaaaaggcatggattatttcatctaccacttcttctttataaaaagaggagaatattttcgacttattattgatacaagtaataaaaatgattacagaaataacaacaataactatcggaccaaagatcccttccaatttaagtattagcaaagcgatcacccctactaccagaaaaatagctgcataaatcaaaccctctgaacgtcctttcctcaggagttccttacgtttattttccagaacttgcaatgtgggcgccagcttctgcgccagagagtcaaaatctacataatccattgccggctattttatgaattgaataagttctttacatccggagttgcacgttctgcttccggaattgtcagtaccgcttttcttgtaaagccaaacatacctgccaacagatttgtagggaaagtctggacggcattattgtaatcggttacagaagcattgtaagtgcggcgggcagcagccaactgttcttccgtttcattgagcgaacgctgcaattgcaggaaattttcagaagcttttagttcgggatagttctccgccactgcaaagaattgagtacgcactttagaaaacatcttgtcaaagtccgccttttcgctgtcattaagagaagtgtaagtcttgttgcgcatttccgttattgcagcaaatgtatcagcttcatgcttggcatattgctgaacggttgcaaccagattggggatcaaatcgaagcggcgtttcaacatgacatcgatagtggaaaaagcattttctatctgatttctctttctcaccaatgagttgtacatcgaaatcaccaccaaaataaaaagtacaataataatagttacgatcataattacagatacaacgacctccttgtgccggttattttatgttaacgaattcagtatttattcctaaaatcagatagcaaagatagaaataatctaaaaacctgccaattatgctgcaagaaagataccgaaccctttttggattcgcttgtgtatctgaaaataaacctgtaaatttgccacaattaaactaacaaaagactatgtcgtgtatcttgcatattgaaacgtccacctcggcatgctccgttgctgtgagtgaagatggacaaaatgtatttaacaaagaagatctgaacggcccgtctcatgccactctgctaggagtatttatagacgaagctctgtcgtttgccgacagtcatgccatgccgattgatgcagtagcagtgagttgtggaccgggttcttacacagggctacgtatcggtgtatctatggcgaaaggagtttgttacggacgtaatattccgctgatcggtcttccgacattgaaggtacaatgcgtgccggtattgctttatcatgatgaattgcccgaagacgcattgctatgcccaatgattgatgcacgccgcatggaggtatatgctgccatctacgaccgtgccctgaagcctgtgcgcgacatagccgctgacattgtagacgaaaactcttatacggaatttctggatcaacatcccgtttatttctttggagacggggcagccaagtgcaaagataaaataactcatcccaatgcgcacttcattgacgatattcgtccgctggcaaagatgatgtttccacttgctgaaaaagcaatagccgaaaacgactttaaggatgtagcttattttgaaccattctacctgaaagagtttgtagcttcccaaccgaaaaaacttttataatatatgcaatataacactcaacaaaagcggatgcctttgccggaatacggacgcagcattcaaaatatggttagtcatgcgttgacaatcgaagaccgcgctgaacgccaacgttgcgcaaacaccattatcaacattatgggtaatatgttcccgcatctgcgtgatgtacccgatttcaaacataaactatgggatcatctggctatcatgtccgacttcaaactggacattgattacccttatgaaattatccgcaaagataatttgaatacccgtccggaagtgatcccctatcccagtaccaaaatccgttaccgtcactacggtcgtacactggaagtattgataaagaaagcaattgacttccccgaaggagatgaaaagcaaaacctgattgccctgatctgcaaccacatgaagaaagactacatgacctggaacaaggatacggtagacgaccgcaaaattgcagaagatcttaatgaatattcgggtggcaaattgcagatgacggatgacatcatcaaactgatggctgaacgtatcaatcagaactaccgtccgaaagtaaacaatcagaataaccggagagataaccggaataataagagaaagtactaatagatttatgatttcagatttatgatttataagcggcagatccgttcataaatcataaattataaatcataagtcataaatcccaatttatggcatcattcgtaattgaaggaggacacagattatccggcgagatccatccgcaaggcgcaaaaaacgaggtattgcagattatctgcgccacgctgctgacagccgaagaggtgaccgtacataatattccggacatactggacgtcaacaatctcattcaactgatgcgtgatatgggcgttacggtatccagaaaagggcttgatacgtattgtttcaaagcagaaaagctggatttgagttatctggagagtgatgaattcctgaagaaatgttccagtctgcgaggttcggttatgttaatcggcccgatggtggcacgcttccataaagcgatgatatcaaaaccgggtggggacaagataggacgcagacgtctggatactcactttatcggtatacagaacctgggtgcaaatttttcgtacaacgcagaacgcgaagcgtatgagatttcagcttgcgaactgaaaggcacctacatgttgctggatgaagcttcggtaaccggaactgccaacatcgtgatggcggcggtactggccaaaggaacaaccactatttacaatgctgcctgcgaaccgtatctgcaacaactttgcaagatgctgaaccgcatgggcgccaagatacaaggcattgcctccaatctgttgactattgaaggagtggacgaactgcacggtaccgagcatacgatacttcctgatatgatcgaagtcggcagttttatcggtatggcagccatgacgcaaagtgagctcaccatcaagaatgtttcttatgaaaacctgggcatcatccctgaaagtttccgccgtctgggcatcaaactggaacaacggggagacgatatctatgttcctgcacaggaaacgtatcagatagagtcgttcatagatggttccatcatgactattgccgatgctccctggccgggactgacgccggacttgctgagtgtaatgctcgtagttgccactcaggcaaaaggcagcgtgcttatccatcagaagatgttcgagagccgcctgttcttcgtggacaaactgatagatatgggagcacagattattctttgtgaccctcaccgtgccgttgtcattggccataaccatgccatgcgtctgcgaggcggaaatatgacttcacctgatattcgtgccggtattgcattgctgattgccgccatgagtgcggaaggaagcagccgtatccacaacattgagcaaatagaccgggggtaccaggatatcgaaagacgcctgaatgctatcggagcaagaattacgagaatatgatatgggatggtggaagatgattaagaatggtaggatgataagatgataaaaagagaagatgtatataagataggagtattcaacaaaccgcacggcattcacggtgagttgtcatttacattcaccgatgacatttttgaccgggtggaagctgaatacctaatctgcctgttggatggtattttcgtacctttcttcctggaggaataccgtttccgctccgactccactgcattggtaaagctggaaggagtagacacggcggaacgtgcacggatgttcaccaacgtggaagtttattttcccgccaaacatgccgaagatgccggaccgggagaactgacctgggatttcttcgtaggtttccgcgtggaagaagttaaccacggagacttgggagaagtgacagaggtggatactgcaaccatcaacaccttgtttgtagttgatcatcagggagaagagttactgattcctgcacaagaagaattcatcctgaacattgaccaaaagcacaaagtaatcactatggatttacccgaaggattgctggctttggatgaaacagaggaagtgtaaattagtgataagtgataagtgattagcgtgtatggtgaaaaagaaacgacataaagcattctggagtaatatcaaattcaaatataagctgactatcatcaacgagaatacactcgaagaagtagtcggtctccgtgtatccaagttaaacggcatctcggtattactttctgtgctgactgttttgtttctggttgcctcagttatcattgctttcactccgttgcgtaactacttgccgggatatatgaacagtgagatccgtgcccaagtggtagagaatgctttacgagtagattcacttcaacagttggtagatcgccagaatttgtatatcatgaatatacaggatattttcagtggaaccatacgtgtagatactgtgcacaatatggactcactgactactgtacgcgaagattcgttgatggaacgcacacagcgggaagcagagttccggaaacaatatgaagaaacagaaaaatataatctgacaagcattacagcccgcccggacatagaaggattgatattttatcgtcccacgcgaggcatgattacagaaaaatttgatgctgacagaaaacattacggtacggatatcgccgccaatcccggagagagcgtacttgctacgctggatggtacagttatcttgagtacttatacggccgaaacaggatatgtgatagaagtacaacataatcaagactttatatccgtatataagcattgcagttccttattgaaacgtgaaggagacactgtacaggccggagaggctattgctttggtaggaaacagcggacaactgacaaccggtcctcacctgcactttgagttatggcacaaaggacgggcggtgaatccggaacaatatattgtattttaagtgatagataaatgaaaaaacaaattgctatactcggttctaccggttccataggtacgcaggcattacaggtgattgaagaacaatccgaccagtacgaagcgtatgtgctgaccgccaacaaccgtgtagaagaacttattgctcaggctcggaaattcaagcctgaagcggtagttatagccaacgaaacgaaatatgcccaactgaaagaagcccttgccgacctgcctatcaaagtatatgcaggaacggatgctatctgccagattgtggaagactcggaaattgacatcgtactgactgcgatggtaggttatgccggactgaaaccaaccatgaatgctattcgtgcccgtaaacccatcgctcttgccaacaaggagacgcttgttgtggcaggtgagctgattaacgatatggcacgcctatccggtacacctatattaccggtagattccgaacattcagccgttttccaatgtttagcgggggaactcggcaatccgatagagaaggtgatccttacggcatccggtggtccgttccgcaattgcacaatggaacaactggctacggtaaccaaagcccaagccctgaaacatcctaattgggatatgggagcgaagattacgattgattccgcttcaatgatgaacaaagggttcgaggtgatagaagcaaaatggttattcggtgttcgcccggatcagattgaagtggtagtacatcctcaatctattatacattcgatggtacagtttgaagacggtgcagtaaaggcacaattgggtatgccggatatgcgtctgcctattcagtatgcattctcttatccgcaacgcctgaaggcttcatttccccggttggatttcaagatgtgcacaaacctgacattcgaacaaccggatactacccgtttccgtaatctggctttggcttacgaagctttgcataaaggtggaaatatgccttgtatcgtgaatgcagccaacgaagtggtagttgccgctttcctgcgggatgagatttcattcctcggcatgagtgatgtgatagagaaagcaatgtctatcgtatcgtttgtggcaaaaccggaatatgaagactatgtagctacggatgcgatgacacgccgtattgcacaagagttgataaaataaaatagtacaggtattagagtatctcaactcccttcttcctcggaggagaataagaatagtaaatagtagttaatagtaaaatagaaaaattattagatggaaacatttttgattcgtgccctgcaactcattatgagcctttcgttgctcgttatcgttcatgagggagggcacttcctcttcgcccgtcttttcaagacacgggtagaaaagttttgtttgttcttcgacccttggtttaccctgttcaagttcaagccgaaaaatagtgatacggaatatggtattggttggctgccgttaggtggttatgtaaagatagcaggtatgatagatgagtctatggataccgaacagatgcaacagccaatgcaaccgtgggagttccgggccaaaccggcatggcaacggttgttaatcatggtaggtggtgtattgttcaatttcatattggcattattcatctattctatgatactttttacttggggagatgaatacgtaccggtacaaaaagccccgttgggtatggaattcaacgaaacggcaaaagctatcggtttccgtgacggtgacgtacttatatctgctgatggtgtaccctttgaacgttacggtggtgacatgctgacaagcgttgtcgatgcccgccaggtaacagtacgccgcgatggagaagatgtatccgtttatatccctgagaattttatggagcgtctgctggctgacagtgtacgttttgcctcattccgctatccgtatgttattgatagtatttgtgccaaccgtcctgctgcccttgccggcctgcaagcaggtgacagtattatgcaattggacggaaagaacattgcttatttcgatttcaaagaagagatgttacgccgtcagaaagcggattcagcttctcattatatcacattgacttatgcacgtgccggagtgatagataccataacttttgctacagattcaatctatgagataggtgcagtggtacgtacggcaaccaatcagttactgccggttgtaaagaaagaatatagttttctggcctctttccccgctggtgcagcattgggagtacaaactctgaaaggctatgtaggacaaatgaaatatctcttctctaaagaaggcgccaagcaattgggtggcttcggaactatcggaagcatcttccctgctacatgggattggcatcagttttggtacatgacagcgttcctttctattatcctcgccttcatgaatattctgcctattccggcactggatggcggacatgtactattccttatttatgagattgtggctcgtcgcaaaccaagtgataaatttatggaacgtgcgcaaatggtgggcatgttcctgctattcggattgctgctttgggcaaactttaatgatattctgcggttcctgttctaatgcaggatctattttataaaagcagatggtctgtttatgcaaaacggactatctgtttaaaacaaatagaccatctactcacttcgaatagatggtctatttattatatgaaatatctatcgtattttcttacactaagtgtccgatccactcttcacgatctcccggcaaaagatcaataaccggaacctctaccatggtgtaacaaccaggttgttgacgcatggaagcgcgagctacacaaaccaatacctgagcagtaagtgcagggttattaatgcgcatattgaactcaaacaattgattctgagttttaccggaaacacctttacgagtgaggtttacaccatgtcccatgtcaagcaaagcatctacgctgggaactaatttcacatgtgtctcgtcattcacaaagtatggatctgccttgatggcagcagctactttatcaaactcataaccgtctttcaattcaatgtaaaccatacggcggtgaataccagttccggtaggaatagtcatggagagagcagcctttacaccatcaacagcttttacagctactgtatgtcccatactcattccaggaccaaagtttgtataagtaattcctttcggagcaatagcttccaacagggtacgcacgatagaatcgcttcccgggtcccaacctgcagaaataatagaaactgcattatgttcttttgcagaagcagacagtgtgcgacgcaaatctacaataccggtatgaatatcgaagctgtcaaccgtattgatgccaagtgcaaggatttctttggcataagtctctacactgcgtgttggtgtacaaagaattgcaacatcaacgccttccaattccttgatattctttacaacagggtattcactcagttctgcgggacggttttcagctccagcacggcgtactacaccggcaatttcaaagtcgggagccgcttgcaacgcttcgagcacgtattgcccgatattgccatagccaacaatggctgctcttacttttttcattcttttattgaatttatttatcagttttctattttatcggcacaaaagtaatcattttcattcaatttaaccacaaaacgattcagtgttccacagagttttttctttattaagacttctttcaaacttatgtaccttcaatgacttaccactctaaaacaatttccaaaggaaaaagttccccgaaactcttctgagtctgtaatgaagaaacacaatattcctcgctcgcgcgcgttatagtaagtattatgatagaatacatcagaggcggacttgccgagctcagcccggcaaccgcagttatcgactgtaacggattgggatatgccgttaatatttcattaaatacgtatgctgccatccaaggcaaaaaagagtgtaaactgtatatctacgaggctatacgtgaggatgcatacatcctctacggctttgcagataaacaagagcgtgaattattcttgttgctgatttccgtttcgggcattggcggtaatactgcacgaatgatactttcagcactttcaccggcagaactggtgaatgttatcagtactgaaaatgccaatctactgaagacagtgaaaggtatcggattaaaaacagcccaacgggtgattgtggatttgaaagataaaatcaagacaggtgctgcaagcgcaggaagtacgataggaagtctcggcggaatgttatctgctgctaatgcacaggtgcaggaagaagccattgctgcattgacaatgttgggatttgcacaggcaccatcacaaaaggtagttttggcaatattgaaagaagagccggatgcaccggtggagcaggttattaagttggcgctgaaaagactttagtaaatgataatttaccagtgtagttattgatattctgactatctcaattcccctcctccagttggaggaggggtgcccaacgggcggggtggtaggtgagagaaaaattccttaattttattattcataggtattttattgttttacctaccacctccccctacgggtactcctcctccgacggaggaggagaatttaagatacttccgcgtaacaattctctcgctggtaaattatcattcatcaattaaacacatatgaagtctcctcgtatacgacatatcatctggttattgctgctgtggctcatgcctggcagctttgtcgttatgggacagaatgtaaatggggagagtgcacaagaagcagaaaatgtacaggatacaatagctccgcgatattccgttcgcaagaccgtgccgggtacacttaaagacctttctccccaccctgccgacctgcaatcacccatgaacctgcgaaccgaagcagaatatgatgcaaaaacagacaaatactatatacgtacaaaattagggaataccgagatcggtgtgccaatgatattaacccccgaagaatatctggattggacgttgaaacaatccatgcaatcttattaccgccaaaagaacggagaacaaatcggcaaaggaaaagaagctttcgactttatggatatgaagttcaaccttggaccagcagagaagttgttcggccccggtggggtacagatacgtacacaaggtaatgcagaactcagcttcggcatgacatacaaaaacgtaaagaatccctcacttccggaaagtcaacgcaaaacactcggttttgactttgacgagaaaattaatatcaacgtcaatggtaaggtaggtgacaaggtgaatatgaacatgaactacaacactgatgctacctttgattttgacaccaaacggctgaaactgaaatatgagggaaaagaagatgagatcatcaaactgattgaagccggtaatgtgagtatgtccaccaataactcactaatacgcggagcatccgcactgttcggtattcgtacagacctacaatttggcaaactaaagctacaggctgttatcagccagcaagaaagtgaagcaaaaacagtgacaagccgcggtggtgcacaaaccactactttcgacttctccgcagataattatgaaggaaaccgccacttcttccttgcccattattttcgggatgtctatgacaaaaacctggcacagcttccgaatatcctttcgggaatcacaattaaccggatcgaagtatgggtaaccaacaaacgaaataactatgataatccgcgaaacatcgtagcactaactgatcttggagaggcctttcacataggcaacactaccgcctggagcggagtgggaaacccgaccaaccccagttcaaacgtcaacgctcccgccaatagcgccaataacctctatgcggaaatgattagcagttatgcagccgcacgcgatatcagccaggtaagtaatatcatgagtacaatccccagatccgaacccggcatggattacgaaaaaatagaaagtgcccgtctgctcacttcctcagaatacacgctgaacagtaagctgggttacatctcactgaagcaaacccttcaaccggacgaagtactggcagtcgcttttgagtacacactcggtggacgaagttatcaagtaggtgagttttcttcagacatcaaggaaaccgggcaaagtttgttcgtaaaattattgaagaacacggcaaattccccggacgcagcctgctgggacctaatgatgaagaatgtctacagtctcaatgcctactccgtgcaaaaagagaaattccagttgaacatcacttaccaaagcgatacaacaggtgtatatctacgctacatcccggaaggaaagattgccaaaacacccctgttgcgtgtcatgaacctcgaccgcctcaatagccagaaccaaacaggtgcggacggtttcttcgactttgtcgaaggctatacggtgacagcgtcggacggacgtatctactttcccgtagtagaacctttcggcagccacctgcgcaaagccatcggaaacgatgcgctggcagacaaatacgtgtttcaggaactgtacgactccactcgcaccgtagcgcaacaaacagcagaaaagaataaattccggctaacaggtgaataccgtgcctccaatgccaacgaaatacggttaggagctatgaatattccacaaggttcagtacgggtgacggcgggtggtatgacactggtagaaaactctgactatacagtagattacacattgggagtagttaccattctcaaccaaagcatcattgatgccggcacagccatcagcgtaaatctggagagcaatacgctctacagtatgcaacgcaaaacgatgatgggactaaacttcacctacgatttctcacagaacttctctttcggaggaagcatcatgcacctcagcgagaaaccactgacaagcaaagttgcaatgggtgacgaaccactctccaacacgttgtggggagtaaatgcttcatggaaaaaagaaagccagtggctgacaaacatgctggacaaactaccgtttgttaccgcaaccgcccccagcagcatcaatctcggtgtggaattcgcccatctcattccgggacatgccaaaggactgcaacaaaacgcttcatacatcgacgatttcgaaagtacacaaaatggcattgaccttcgtcagccctcatactggatgttggcaagcaccccctctcccctctttcccgaagcaacccgcagcaatgatatcagttacggaaagaaccgggcactgctggcgtggtaccatattgacggactttttacccgccgtaactcttcattgacacctacacacatcaaaaacgacctcaaccaacttagcaaccactatgtgcgtgaggtctatgagcaggaactgtttccaaataaggaaactccctaccaggaatcggcttccatgaacgtactgaacctagcctattatccacaggaacgggggccatacaatctggatacagacctgaattccgacggtactctgaaaaatccggagaatcgctggggaggcatgatgcgtaaactggataccagtgatttcgaagcggcgaacattgaatacatctctttctggttactggatccattcatctacgaagaaggcagtattgagggaggaataacacgaacaggttcggaaaaggcaacacgagcaaattcccccaaaggtactctctacataaaccttggcgaagtatctgaagacatcctcaaagatggcaagaagttcttcgaaaacggtctgcccattgatggagatgcaacaaagaccgaagaaacagtttgggggcgtgttccccgcgatcgtagtgtggtatatgcctttgataatgcagccggcgcacgccgtaagcaagatatcggactgaacgggctctctactgaagacgaacgtaccttctccacttatcagaaatatctggcagacgtacagggcaaagtggacgcctccacttacgagaaattttacaacgatccggcaggcgacaattatcattatttccgtggctcggactatgaccgggaagagcgtagcattctggaacgctacaaatactataacaataccgaggggaactccaccgcgagtgaagactctccggaacgatacgatatatcttcaaagaccgtgcccgatgtagaggatatcaatcaggacaatacactgaacgagactgagaaatatttccaatatcgcatcaacctgacaccttccgacctgaaagtaggacagaattacatcacggataaacgaaccgccagtgtccgcctgcgcaacggacaaacggaagaagtgacctggtatcagttcaaagttcccgtacgcagtggcgaggcggtgggaagcatcaaagacttcaagtccatccgtttcatgcgcatgttcctgaccggatttgagaaacccatcgtgctacgttttgcaaccttagagttggtacgcggcgaatggcgcacctataccgatgcactaaataatacacaacaaggcgcctctaccaccagctctgctgcactggacgtttctgccgtcaatatcgaagaaaatggagaccgtactccggtgaactatgtaatgcctccgggcatctcccgtgtcatcgatccgggacaaccgcaacttcgtcaacagaatgagcaagccatgagcctgaagctggaaaagttggctcccggcgatgcacgtgccgtctacaaaaataccggtatggatatgcggcaataccgccggctgcaaatgtttgctcatgccgaagctttgcccgatctctccacagatccgcaaaatggcgaactttccgtattcatccgcctcggctcagattaccgcagcaactattatgaatacgaaattcccctcacactcactccgcacggagaatacaacggaagcaccgttgcaggttgccttgccgtctggcccaaagacaacaatcttgacattgacctcagtgtactcaccaatgtcaagaaggcccgtaatcgcttgaagaatatctcgaatagtggtgtcagctatgcaaaagtgtattcggaatacgatccggataaacccgccaataagataagcgtgattggtaatccttcactggcagaggtcaagactatgatgatcggtgtgaggaacaactcacgcaccattaaatcggcagaggtctgggtgaacgaactgcgcctaaccgaattcaacgaagacggcggttgggctgcacaaggcaatctcaacttacagctttccgatatcggtagtatcaacctggccggccatgtggaaacagccggtttcggcggactggaacagagtgtcagcgagcgtcgactggacgattattatcagtatagtttcaccactacattcgatctgggacgtttctttcctaaaaaggctaaattggccgctcctatttacttctcttactccaaagaggccactacgccaaagtacaaccctttggacaaagatatgctgctggatgatgcgctggatgcctgtaccaccgattgggaacgagactcgctgatgaatatcgcccgtgaaattactacctaccgcaatttcagcctcagcaatgcacgactgggtattacaagtaaaaaccccatgccttatgatccggggaactttactttcagctattcccgttccctccgccacaaccaaggtagcaccacagcttacgaaaacgaaacggactggcgcgctgcaatgacttataattatgctcctgtctatcgcccgtgggaacctttcaaagctatggaaagcaaatctccatggatgcgtttcatcaaagaaatcaatctgaactggctgcctcaaagcatctcattcaataccgatatgacgcgtcactattatgaacttcaactccgcgacctggaggcattgactgccggaagcagttccatcggcagcggggatctcagtatcgaaggcatccccatctccgtcgctaaagaatttctttggaaccgtgactttgccctgcgctgggaccctacaaaaaacctaaaactgaactttacctctgctacccacgccgagattgaagaaccttacggtgtagtaaataaagacctttaccccgatgaatactcagcctggaaagatacagtacgccgcagcctgctctcactcggccgccctattgatttccagcagacattcaatgccacttataagctcccattcgacaagttccccgctaccgactgggtcagcgctgaccttcgtttcgcctcttcttacaactgggaccggggtgtttccctttccgatggcatagagatgggcaatactgtcagcaatcagcgcagcatcgacgtaaactcgcgtttcaatctcgaagcactctataacaaggtgccgtatttaaagaaagtaaaccgccgcttttctgcttcctatcgcaaacccgcctcacccaaagaacaaaagccccgtcgcttcgacaaggaagtacaattgcgtgcagacactacagttaccattcaacacggtatgaactcccgtcgtcccaaagtcaccgctctcacagtggacggacgtcgttatcccgtacgttataaagttataaatgctaattcactacgtattgatacgcaggacacggcacgcataaagctcactgtaatccccggtcctgatccggaagatggttggtggtataaattcggccagcatgccacccgcattgccatgagcgtacgcaatttcagctttacctacaaaaacacgtatgccatgacccttcccggtttccgtcctgaagtcggtgacatgttcggccagaaaaaacacggaggcttccttgctccgggaatggactttgcattcggtttcaccggagacgactatatcgaccgtgccttgcaaaacgactggctcatctgcaacgactccgttgtcagccctgccagcagcaatgcccttgaagatcttcaattgcgtatctcccttgaaccgatacgcgacctcaaaatagaccttaccgccaatcgtacccgaaaccgcagccgcgaaatacaatatatgttcgaaggtatgccagatacccgcagtggcaacttctcaatgagtatcatttctatcggtagtgctttcgaacgccccagcgccggtgacggttaccattccggtacattcgaacgtttccgccgcaaccttgacgtcatccgtgaccgtgtggaatcccaattcctcggtgcacaatatccgcaaggcagcactcttgccggaaagacattcgatccggcaaacggcacaatcagcaagcactcaccagatgtcatgatccctgccttcctcgccgcctacaccggaaagagcgctcggaactccgctctcgacttctttcccagcctgttctccatgatgccgaactggcgtatcacctacacaggacttaccaagatagcctggttcaaaaagaacttccgcagtgtcaatctgaatcatgcctatcgcagcacctacagcgtcggcagctacaacactttccagagtttcatgagctatatgggggatataggctttgtagaagatgtgcaatcaggaaatcctatcccttcatcgcgcttcgacatcagcatggtatccattaacgagcaattctccccccttatcggtatggatgccaccctcaaaaacggacttaccgccaaagtggaatataaaaccagccgtatattaaatctcagtatgagtgcttgtcagctggtagaaaccgcttcccgcgatttcgttatcggtttgggatataagattgtaaacttcaatttattcagtgcccggaatgtaaaagacagcaagaatcgtgtcagccatgaccttgctctccgtgcagatatttcattccgcaaccaatccgccctctgccgggacatccagcaaggttttgcacaagctaccaatggcaacaaagctctgaaaatatcatgttcggcagactacaccctgagtcgcttgttaaccctgcgcctctactatgaccgccaacagaatactccgttagtgtcctccagctcatatccggtagtcagtgccgactttggtttcagcatgaaattctctctcacgcggtaaatatactcgactattaagagcaattcaagggaaagtcctatctttgtgagataaacaacaagcaatatgaaacaagcaagaatttacatgaagcgttggttaggtattaacgaacgcaataaacaactctcgaccgacacttggtatttgaacttcgccaatcaactgctatctttgatcgatgaatcccctttatacagtaaaaagtttgaagcagagaaagtagatgccgccctttcattggctgtttatctgcaagatgccattgcccagtccggtggttggaaagagttttccaatgcctattacagattgtacaagtcctatcttcctttctatacgctgaccgacgagtatcttcccgacgaaatcaatgtagaggatatctcattcattcagtggacgctcctctcccgctatgccatcttcgaagaggacgaaattattatccagaatcctcatgattctgacctgatagaattcagccaaaaggtatatgatgtgatggataccgcctttgaagaagctcccatctgcgacgagccgtcttctcccatttgggtgatgggacttgatttattggaaatgccattagtaccacttcccgaaatcactcccggaatgacacttaaaaaagatgtggagaactgcctgtcatacagcaaaggagaaccactactttattttaccacctacgatgaattacgccgtttctttgtggaagaactaaaatgggaagataaaaatgaaagtctgttaccggaattaagagatgaaagaaactttgtgatctatgccaatgccaaaggtatgctgatagcctctaatgtttcttattgcttctgcgatccacgcaatccgacttataatgcagaaaaggcagctgccaaaggattcaaattattcacttatccgggcacctgcccctttgacctcctgaagtatggtatggcaaaaggcctgcttcctgatatgcaacttcccttccctggtggaaaagaagtattgcacgataattgggacttcattgcacgatacttcttgtgtgagtattacgaaggagagtgaaaataagtgattagttgttagtgataaattgtaagcataacattaatcacttatcactaacaactgatcattatttctacatttctataatctcttccttgcacagtgtcaacttctccaccccgtctgccgtcactacccatgagttttcaatacccagggggccgacacccggcaatacgattttgggttcgagggcaaataccatacccggttctaattcctgcttcatacgcggagccagtacaggagcttcgttgatttccaagccaatgccatgaccgataaatttcgccttctgtcctactcccataaagtaatcggcaaatccggctttcgttacgatatcaatagctgtattatagagatcttcgcaaacagcacccggttttgccttttcaatcacagctgcctgtacatccagacatgtttgatgcgcagcataagccttctccggtaacttaccgatagagaatactcggctcatatcacccatgtatccatagaagtttccacccatatcaaccataaaactctgaccgggttgcaacagtgcaccatttgcaccgataggtatagacggatcaagtccttcaccacctaaagcaaagtcataaggtgcaggagcagtggcattatctcccgccagcaagctacccataaatatctccatactctgaccaaatgtacggaaaatacccagacaaccctccaaacgcatcaggcgttctatttcaatagacaactgacgatctgtcattcccggtcgatacacagaaggaatctgttcataagccttcgtatgggcaatacccgaacgacggaacatttcaatttcaatatttgtctttacactacgtgccttacggatcagaggagtaccattcacaacagtagtttctaggaagcaagctgccagacgggtatactccgtataagaaagttcgtctccctccaacatcaatttcgcaggcaaaggtagaccgcactctttcaataaatcgggcaattgttccggcttacggatagaatgtatatgttctccttcaatattattaggacgtttgataaataagcgtgccggagcattcaatggtaaatacagatagccgctgacaacgcgtccgtacgtataaatcaagtttacattgcaagtgataagagcggcatcaatctcttgttgagccatcaagacacgtatcttatcgcgtcttaactttagttccggttgtaacatctctttgttatttaatgattttccgggtgcaaaggtaataattttggtattaagtacgaggtattaagtattaagtttgactgatagttgcgctgtagaagtgaatatacctaattgttggtatgcctataaaaaaagtactgccctacaccttcacaggcaggacagcacaaaccacaaatacaaatacaactaaacaaagttttcctttaaataattccctgacccatcattgcgtgagccaccttcatgaagcctgcaatattggctcccttcacgtagttgatgtaaccgtcaggttctgtcccatattttacgcattgtgcatgaatgccgtgcataatagcgtgcagtttctcgtccacttcggcagcacaccaactgagatgcattgcattctgtgacatttccaatccggaagtagcaacaccaccggcattgactgccttacccggagcatacatcaccttatgttcgatgaacaggtcgatagcttccggcgtacagcccatattagatatttcacccacacacatcactttattttcaatcaactgacgggcatcatcaccattcagttcattttgcgtagcacaaggcaatgcaatatcagctttcacttcccatggacgcttgccggcaacaaatgtagaaccggggaattcgtctgcatacggagccactatatcattgcccgatgcacggagttcaagcatataatctatcttttcgccactgataccattcggatcatagatgtatccgtccggaccggagatagtaactacttttgcgcccaactcggttgctttggtagcggcaccccaagctacatttccgaaaccggaaacagcaacggtcttacctttgatatcaatacctttagtttctaacatctggttaacgaagtacaatccaccgaaacctgtagcttcaggacgaatcagagaaccaccgaattccaaaccctttccggtaaatgtgccggtaaattcacgggttaacttcttatacataccgaacatatagcccacttcacgaccacctacaccgatatcaccggctggaacatccatatccggaccaaggtgacgccataactccaacatgaatgcctgacagaagcgcatgatttcaccatcgctcttaccgcgcggagaaaagtcggaaccacctttaccaccacccataggcagagtagtcagtgcattcttaaacgtctgttcgaagcctaagaatttaaggatagaaagatttacggaagcatggaaacgaataccgcctttgtacgggccaatggcattgttgaattgcacacgataaccaaggttggtttgtacatcacctttgtcgtccacccaagtaacacggaacgtaaagatacggtcgggttcaaccaagcgttctatgattttagctttctcgaactctggatgctggttatagatatcttcgatggaaagaagtacttcctttacggcttgaagatattcagactcgccgggatgctttgcctctaaagaggacataattcgttcgatattcataatattatgttttaaaggtttattccttcgtgactttaaggttattcgagcaaattgtcaacgaataacactgcaaatataggaaaacttttggattcacctatacttttcagtgatattttgattaaataatgataaaacgtcagataagtaaaaaaattgagagtggagagttgagagttaccatgcggcatatagtcgcaacacagcgcagccactctcaactctccactctcaacttattcaaacttcattcccatattatacatgataaaggcataagtgtcagcctgttcttcaagaaccttagtcataggtttgcctgcaccatgtccggctttactttcgatgcggatgatagtgggattcgtaccgtcattacattcttgcagggtagcggcaaacttgaatgagtgtgcgggaactacacggtcatcatgatcggcagtaatcaccatggttgcaggatatttggtaccgggcttcaggttgtgcaacggagagtagcctttcaggtactcgaacatttccttactgtcctcactcgtaccgtaatcgcttgcccagttccaaccgatagtgaacttatgatagcggagcatatccattacacctacctgcggaatggctacgcggaacaaatcgggacgttgtgtcatacaggcacctaccagcaaaccaccattagagccacctacgatagctattttatctttgttagtatacttatcattaataaggtattcggcagctgcgatgaaatcgtcgaatacattctgtttctgcatcttcgtaccggctatgtgccagtcttcaccatactcgccaccaccacgcagattaacctgtgcatagatacctccattttgcaggaacggaatacgtgatgtagagaaacccggattaaggctgatattgaaaccgccgtaaccatagaggtacaccggattcttaccgtctttcttaagatctttcttataagtcaggaacatcggtatctttgtgccgtccttgctggggtagaatacctgctccgttataaattcatcggagttgaagtcaaccttcggagcacggaagagctcataggtattcgcatccatatcatatttatacgtagcaccggggatggtgaacgaagtaaaaccgaagaaacattctttgtcatccttgtcgccactgaaacctacggaaccgagcgaaggcaacttaatttcctgtatttccttgccgtccaggccatatacatacgcatgattggcagcatctttatcatacgtcaggaataacttctcacctatcacaccggcatccgaaagtacattctcactttccggaaccagctccgtccagtctttcaaagcgggtttattgatgtccgccgtcatgaggcgatatttcggcgcattgtaattcgtaaacatatagattttgtcaccgatcacctctataggagcataagtgtaatccatatccgtagccattgcaacgaacggtgcattcggtttacgcagatctttcatatacaaggcattgccacgtccgtcgccactctcatacaggaacaggatggtttcatcctcattcacactggcagtatagaaacgcttgggatatgcctgattctggtaaaccagcttatcctgcgattgcagtgtacccatcttatgatagtaaatcttatgattctcgttcacgttagagaactccttccctttcaccggagcatcgtaagcgctgtagtaaaatccatcgccctgccaggtagctcctgtaaactttgcccattcaatatgatcgtccagcaacttaccggtttcggtatccattacatagatttcctgccagtctgaaccactacgcgcaatggtatagccggtatattttccattattcgaaaaataaatgcctgtcaaagctaccgtaccatcatccgaaagtttattaggatcaagaaatacacgtggttcaccgtccaagctatcctgtacatacagtacactctggttctgcaaaccgtcattcttatagaagtaatacttgccgtgtttcttgaacggtgtaccaatcttttcataattagccacatccgtcagtcgcttcagcagagcatcgcggaaaggtatcttagacaaatagtcgttcgttactttgttctgagcttccacccatgcagcagttgcagcggaagtgtcattctccaaccaacgatacgggtcgggtacttctgttccaaaatagacatctacagtatccaccttcgcggtttcaggatacgtaagtttctgttgttgttgtgcacatgacatcatgatgataccggttgcaaataaagttacttttttcatattatacatatatataagagtgtacgagctacaagctacgagctacaagtgctgcgctgtgggtgttggtgacgagttactgcgtagccacttgtcacttgtagcccgtagctcgtaactaaatttagtttaggcgttaaaattacaaaaacaaccaatagtaaacaaggatttctcccataattatacttcaaatagcatttccagccggattcattcattatactatactgagatatgttcccatcaggattgaggctacctcccataacgacagaaatagtgtttcactacaactgatcatggtggaacaccaagtgtaagagtttaaatatcatcaatagaagtcgagaatctatcattttccttcattttgatggtttttaaaggttttatggcggttatcaaaccttcttttgccaaattatggctaaccttgcatcagaaacaaaaggttatcataatcatgagaaagaaatcattcatattactcttgttgttcataagcaatacttccctattcagtcaaaatcctctgacggaggatgcccttttagagaagcaaatttatgaaacaggactgatccatgccccgctgcctttgaacacctcccgttctttcgaagagaatgctttgaagaaagaggtgttatccagccagccgcttacggaaactgaaggagcagacgggtggactcattccggagccggaaaaatgtctttctcaaaagagaaaaccatatctggcaaagggagcatccgtttatcttttcctacttataccggaaaaagagccgctggttctccttccgatcccgactatgcaacttatggaaatagccgtatcacctatcacgtcgatggtaggaactgggaaaagtacaacaggatctacttttctatctatcctgattgcgacggcgcacgcgtagtcaatatgaacctgacttttacaaacgacagttccacacccaaacaaggttataatccccccagcggttcccatctcatcaatctggtaaataagcaatggaaccattgctttctggaaatagacgaatatcagcgggataaggtaatatccatcagcttcgacaccgcactgaaagggaaagaccggacaacaggagactctgccatttattatgtggacgatatccggttgcagcaaatcaaaaatccggaaaaagtgagcggatgggaaccggcggagcataccatcatatattctacaacaggctatgccataaatagtccgaaaacagccctcgctcataccaattcatgcaaacagtggaaacaattccaactgataaactccgtcagcaaagaagtggcatacgaaggtgcgctgaaacaggaacaaaccaccatcggaaagttcggagtcatggacttcaccgacttcaaccaaccgggagactatcaactgaaagtaggtaaaaacatcactcctgcctttcggatcggtgaaaagttgtgggataattctctctggaaagtactgaatttcctgttttgccagcgttgcggacatcccgtccccggcaaacatgccgcttgtcatactgatctattctcccggcatgacggaaaaagcatcgcctattcaggcggatggcatgatgcaggcgatttgtcacagcagacgttgcagaccggagatgtgactttctccctactggaagcatacaaccggctcaaaaccagaaatactccgttggcagcccgtctgctggaagaagcggaatgggggatcgagttcatactgaaaaaccgttatggagacggctatcgtgccagcagtatgggactgcttatctggcaagacggcatcctgaatacattggatgacattcattccgtacgcgttcaaaacatggcattcgataatttcctgtacgcaggatacgaagcatacgcggcaatgaccataaatcgtgacccgatgctacaagagcatctgcgaaaggtagcggaggaagactttgcttttgccacagaaaaattcgaaagagagggtttcgacttattcaaacagatgtacgaacatagctacaacacctccgagagccaatatatggcaaccatatcctggtctgccagtatgctctacaagctcacgggcaaggcatattatgccgaaaaggctgccgagaccattcgatatgtacttgcctgccagcgtacgaagcctttacaggatccggaaaaaacctgcggattcttctatcgggatcagtctggaaaatccatcgtacactatatccatcaatcacgcgaacaagtctacatgcaggcaatgacgttgctttgtgaaacacagaaacagcaccctgattatcagaagtgggtgaactccatacaactatacggaaactatctgaaaggtctgatgaaatacacccggccttatggaatgattccgagtggagtatatcatgcggaagagtacagtgattcagcaagtttctacgcgcttcatctctttccgcccgccaatgcacggcagctatacacggaacaggtgaaacggggagtcaaactcgacaaggaacattacctgaaacgtttccctgtatggttcagtatcttcaatggaaacacagccatacatctctccaccggaaaatccgctgccatttgcggcaacttccttaaagacgaagagttgctgaacatcggtcgggaacagctctactggacagtcggaaaaaacccattcggacaatccctgatatacggcgaagggtacaattatccgcagatgaacagtttttcttccggtgagatgacaggcgaaatgcccgtaggcatccgcaccctgggcaatgatgacatcccctactggccacagaccaacaatgcctgttataaagaggtctgggtgacatcggcaggaaagtggctatcactgattgccgaatactaacaaaagaaattattaattacataaaatcaaaaaagctatgaaaactattaagttttaccttgtcctcctatttacagcatgcacccttctggtaaacgctcaaactcccgaaggctatcctgccaattatgcccggggcccccgcttcaaggcattagtctactatacgcagcatgcagaagaagcacattatcagttctccctgcaagccgtagagttcttcaagaaactgaactacggtgacggtttcgttctcgatctcacaatggatttgtcttcctatacttacgaaaagctaaaagagtatagcgtagtggtgatgctcgacggctaccccaatacaaaagccgaacgggatgcttttgagaagtatatggaaaacggtggtggctgggtaggcttccatgtagccgcctacaatgacaagaacacccaatggccctggttcgtcaacttcctaggtggtggagtcttctattgcaacaactggcctccccaaccagtcctggttgaagtggacaacgagaaccatccagtcaccaagaacctacccgcctcttttgtggcaccttccagcgaatggtatcagtggaatcccagtccgagagccaataaagatgtggaagttctgctgtccctctctcccaagaactatcccctgggcatcaaagatgtagtgaacttcggtgatttccccatcgtatggaccaataccaaatacagaatgatatatctgaatatggggcatggcgatgaagaattcattgacgccacacaaaatcttttgtttgtcaatgccttccgctgggtggtaagtacggacaagcaaggagatcctttcaaaaaataacataaaaaaaagattaacagtttcaagaggtcagatattctctcaagaagaaggtaagtaagattatatatcttttgtgagcatacagcacccgcatgaacagcatcattaaaaatacctaattaatattgggaaaaaggaggagcaatagttcctcctttttgttttttccttccctcctatccggaaaagaggaatattctgatttatccggttttaacaaatggataccagcaggaaacaaataaaacagattgccttattttttgtcgtacataatatatatttctataaattgataataaaactatggcgactgtaaaagtaaaattcagaaaatcatcggtggagggaaaagccggtacaatctattaccagctatgccacaagcaaagcaacaggcagataaccacccgaatgcgcgtacttccccattggtgggatgcagaaaaagaaacattcatagctgaagcggacaacaatggcttgtcggcccgctaccaacagcaaatagaaaaagacttgctgtgcatccgtcggattctatgcgaatgggacggagaaggaagagactacactttagcggatgtcattgaccgctttcgtactttgaatgaaaacggagacacagtgctgtcttgtttggcaaccctgatcgatgagcttaaaaacgatggccggtggggaaatgcccgcaatctccaacgggcattgaacagcttctccgacttcctgggaggcttagacagaccactcaagcaggtagacgaaagacttgtcatggaatatgaacaatggctccggatacgaaaagtgagcaaaaacagcagttctttttatatgcggactttgcgctctgcatataataaagtgataagccggaatcaaatggaacaaacatttccttttcgaaatgtttataccggtgtagagcgtacccgcaaacgtgccgtacccgaagatatcatggttcgtttacaaaaactagacctgacacattctgctccgcttgccttttctcgcgacatgtttattttcagttattgcacccgtggaatggcttttgtagacattgcctatctgaaaaaggaggatgtaagcggaggaatacttagttatgtccgccataagacgggacagcgcctcacagttcgcatagagcctcttattgaagagattatcgagcgctacgagccatttgtccacaacagtccctacctttttccaattattacatctaatgatccggaagaggctttccgacaatatcagacggcgctgggttatcataaccggaaattgaagaaactggggaagttgacaggagaaaatctacatctctcctcctataccgcaaggcatagctgggcgacggttgcacgcaaacacaacgtcccgttgtccgtcataagtgcaggtatgggacacacttccgagaagactacactcatatacttggattctgtagaaaattcactgatagacaaggccaatgaagaaattttagaggcattatgtcgtaacgtttctaagtaagaaaccttaaaattacggcgcaaagatataacaaataaaagaataaaacaacataatgctataaatatttgtttatattttactctcaaaacaagtataaaatattgatttttaacacaataagcaactacttatacaaaaaagaaatgaatagatatttaaaacagatgctaatatagaactcgatagatatattctaaaaaaattatccatacatcgtaccgaatctaccaaacctaaaaaaataggataaaaagatattttttatcctacaggaattcaacgcattaaaacgtcgtaccgtttcttacttagaaacggtacaattacagggttacggataccttctcctgggtcaggagaagttccgagttccaaaaatcgacagacaaaacgaagaattggattaaccttgcttgctgcgcatcagagttgctttaaagatcagaaatactccgatacgcaggaatggaaggaatatcttttaggtgagatacgacaaatatggaagaggtatcttcaattatgcattggtatgcattcaaagtcttttacaataaggtatttgagatagaagactcgctgaatagagacaaaatcgagacctatattccttgtgaaagaattcttgtggaacgtggcggagtgaaaaagtacgtgcgaaaaccgatcatttcctccctgctgttcttctattccacagagaaacaagcactggcgttacagcagaaactgacagaccgagtcctcctatatacccgtcttgtcaattggcaaaaactgccaatagctattcctgaacgggaaatgaaaattttcatgcttgtcacttcctccggcgagaaagggctggactatttcggcgacgtccccatggagtacagcaccggtgaacgggtgcttgttacggacggtccattcaagggagcagaaggctgtatacaccgcatcaaaggaaatcgtcgcctgatagtggcaatacaaggtgtgtgtgcggtggcaactgcctatattccccaatgctttctcaggaagatataaatcaatacatttaaacaagctctcacctaatcaaatccttcagaaatgacaacctgctattttgaaactttggcggcattcgccgtcagctgcctgctcagtgcaatgattattcccaagatatcgctgatagctttcaggcggcgacttttcgatccgttggacgaccgaaagttgcatacgacgcacattccccgtctggggggaatcgctttttttccgtgtatcattatgcccatttcgctcgtcattgcctgccataatctctgtacagacagcaatttactcagttgggaacaatccacttgtctgctcaccctattcagctgcctcttcatgctctatctgatgggaatgagagacgacctaataggtatgcgctaccgtgccaaatttatcatccagacactttgtggccttctattggtagcctccggcttttgtttcgacaatctctacggactgtttggcatctacgaattaccctattatgtgggcataccattcacagtctttatcattgtctatatcatgaatgcaattaatcttatagacggtatcgatggcctggcttccggattgagcatgatagcattcttcgctttcggttgcatgttcgtctgtctacactggtggttgtatgcctttatctcctttgcagctttgggggcactgataccattcttctattataatatgttcggacagacccgccgaggacggaaagtgttcatgggagataccggctcattgactatcggtctgttgctggctgtaatggccattcatctcagtatgtccgatcccgtcaaggaagaattctttcccggtgctatcgtgacggctttctctttcctgttggtgccgatgctggacgtggttcgggtagtgcttcaccgcctgcgcaaccatcaacctccgtttctccccgacaaaaatcatatccaccataaattcatcgccctgggtatgtctcaacatcaggcactctgcttcatcctgagtatcgcctggctttttattattgccaatacacttttagcctcttacctgtccgtcaccgtactgttcctgctggacgtagcggtatggacagcgatgcacttctacatcacagcaaaaattacaaaaaaacaccccaaaaattaatacttcataccttatacttcatatttctattttatattaaaattaaaacatgaaaaatcatcttttatacttgctattttcgttggcgttgctctcatcgtgcaacacatcgaaagagataatctattttcaggacgtggaggtaaacagccccgaagcggtggccccaccccaggacatcaccgttcaacccaaggatcagatatccatcgtagtgtcgagcaaggaccccgaactggcggctttgttcaacctgacgcgcgtgcagcagagggtaggttccacaggactgaacaacagcaacaacaacggagaaatttccggatatacgcttgatgacaaaggtgccatcgactttcccgtattgggaaacctcactgtggcgggcatgacccgaagccagattgccgcattggtaaaacaaagactgaaggaggagaacctggtgaacgacccggtggtcaccgtggagttcatgaacctcagtttctccgtcctgggtgaagtgaagactcccggaaaatacagtatctcaaaagactatataaccttgctggaagctatcagcatggccggtgaccttaccatctacggcaagcgggatgccattttcgtgatccgtgaagaaaaaggagaacgggtgacgcactgggtggatctccgctcctgcgatctattcaaatctcccgtttattacctgaagcagaacgacgtggtatatgtgcagcccaacaaggtacgtgccggacaatccacactgaatgaaaacagcgtgaaaagcgtaggattatggattagcatcggatcattcctcacctccctgggtgtattgctgtttaaataattacttattattatggttgaaaagaaaacgcctgtcggcaaacccgccgatgactttatacggatacaggatctgtggagcatgttcgttcccaaatggtactggttcgccatctccctgttcattaccctgactatagcggtgttgtacctgctgagtactccccctatttacacccgtaccgctgccattctcgtcaaggacaactcgaaaagcagctcttctaccagcgctatgaacgacttttccgatttgggtatcttcaagtccaataccaacatcaacaacgagttgctgacattaaagtcgcccacactgatgacagaggtagtcaaccggctaggattgaacgaaacctttaccatccgcaaaggattaaagaacgtagatttgtacaaagtatctcctgtcaccattacattctgcgacaaaatagaagtgccattaagtttcaccatcaagttctcttcaaaagaggcgtttgccatctccgaacttgaaatatcgggagaagacataggcgaaacactctccgcccaaatgggcgactccatacagacctctgccgggatcatgatcgtatcccctacacaagagtttaccgacgcttttataggcacatctatccggtacgtccggggaagcgtgcgcgctgccgtcgatacctattcaaatgcactggtcgctgaactgggtaacgaagatgccactatcatcaacctcagcatcaatgacacttccatccggaaagcggaagacatcctgaataccctgatcgaagtctataatgagaactggattcgggacaaaaaccagattgccgtcagcacttcgcagttcattagcgaccgcctgggcgtgatagagagcgaattggggcatgtcgacgaaaatatctccagctacaaaagcgagcacttgctacccgacgtacaggcggcatccagtctctacatggcgcagtccgctgagaacaacaaagaactgtcgacgctgaacaaccagctctccaccgcccaatatatccgcagagaactgaatacaaaacagttggaccaaacgttgcccgccaattcaggtattgtcagcgccaatatagaaacgcaaatcagtgaatataacaatctggtgctggatcgcaaccgactgatagccaacagtagcgaaaaaaatccgttggtaaagaacatggccagttccctacagagtatgcagcgaaccattatccagtcggtcgataatctgatcgtttcactgaatacccaaatacgtagtctccgccgtcaggaagaggctaccaccaaccggctggcatccaacccgaaccaggcaaagtatttgctgtcggtggaacgccagcagaaagtaaaggaagaactttatctctatctgctacaaaagcgtgaagaaaacgaactctcacaagcatttaccgcctacaacacccgcctgattaccgctccgcgcggcagtatgtttcctaccgctccccgcaagatgaatatcctgttggtggcatttgccgtaggattactggttccggcagtaggtatcttcatgaaggagaacatgaataccaaagtgcgaggtcggaaggacctggaaaatctgagcatcccattcataggcgagattccccaatactccggcacaaagaaaaaatggtgggaattcaagcaccggaagcggcaggacatgaaaatcatagtagtgaatgagggtaaccgcaacatcatcaacgaggcattccgtgtgttacgttccaacatggatttcatggcaagcaaggacaacaaccaacatgttttcgtattgacctcattcaatcccggcagtggaaaaagtttcctagccataaacattgccataagcttcgccatcaaaaagaagaaaatcctggtcattgacggagacctccggcacagaaccgtctcttcttatgtcgattctccgaacaagggattaagcgactacctgaacaatcagattgaagactggaaggaaatcatagtgtcctacaagggatacacgaacctgcacatcctgcctatcggaacaatacctcccaatccaacggaactactggaagacagcaagttgtctatgctgatagaggcattaagaccggaatatgattatatcttcatagactgtcctcctgttgacatcgtagccgacgcacaaattattgaaaaatgggcggaccgcaccattttcgtagtccgctccggcttgctggaccggtccatgctttccgaactggaaaatatgtataccggaaaacgatttaaaaacctctccatgatactgaacggaacggaaagtaccggaggacgttacggctatcgctacggataccattacggttatgcttcctattatggcagtaaagataaataaaactcatgtggccattttctaaatcccagcccgtcgcggcaagcggcatcctttgcgaaatgactgactaccactcccacatattgcccggggtagacgatggcgtgaagacaatgaacgagtcacttcagattcttgcggagatgaaacaccaaggagtccgcaaagtgtggtttactccccatatcatggaggatatacccaataccaacgccgggctgagagaacgatttcaagaattgaaagagaaattccggaagccggaagatgcctattgcggtacggtggaactgaatctggccgctgaatacatgatggacaacctcttcgcggagcgtctggaggccgacgatctgcttccgatctacgaaggcggttaccggtatctgctggttgaaaccaccggtttcactccgcccatgaacctgctgcccgtcctgaaacgcattcagacgaaaggctaccggcctttactggcacaccccgaacgttatctatatatgggcacgtcctactactgtatgttgaagcaagaacaggttgctttccagttgaaccttccgtcactgacgggagcatacggcacatatatacaaaaaaaggccgtatccctgctgaaagcagggatgtacgacctgacaggaaccgatacgcattcttcgaagcatttcaaagaatggctcggaacacggattggcagtcgagacagggacatgctttgggcacacttcccggcatgtcgcgatggcctctgagctgcgccttcgggaagagtttcagcaactttgtcagaagctgttccaagttttcgaactgctccggggtaagcgtgtcagcgggatgtccttccgagtccagtccgccttcatagcatacaccgatggagcaccggttgaaaggacggcagtgggcacccacttcgagtagtcggcgatgctgactgacggtgccgtcgcgacggacgtaaaagtgataaccgatagtacggaagccacgggcacgatggtcgcgcaagagttgttctacggtgtagtcgctgttacaacgtgtagcggaacagtgcagaatgatatagcgtacggagtcggtggagtccatcatcaatccgctttccacccggacgaggagttcacgctcattaagcacttcctcctcgcccacaatcatgggaaatgtttcctgtatcatggcaacagacattcgatggcggttgaacaactggttattcccagtgccgtaagagccgcaatggctgcctggataatggcattgagcagggacacccaagtgattttattcttttttgcagagtcggtcatgagatttattatttataatttatgatctataatctataagctgcgcaatgtgcgcttgcgaaacctcatacgcttcgcccacgcaccgcgcagcctttaattgttaattattaattattaattttgaataattctatcccaaaggattttcgtccagtccgcctccgccgggattgtcggttccgccttcatcatccacattgcccgggtcggacgaagtcacctgtttgatgacttttccgtccttgtcgtaacaagtgatgttgatggaggtatccttcagttcctgcttgatggtggtactgggagtgaaaatgaccttgcgggtggtgatgagtcccgtacctacatcttccactttggagacagccgcggcttgcaggccgaagcgcatggtacccactccgggcagggcaacggaatgtccctcggtggtccatgccttgacaacctcaccaatggcttcccaggcagcctgaaggcttcccttcgggattcccgagcggatggaggcttcggatatgactttttcctgcttcagcgtgctgtagatttctgcctgcatgatgaaacgatactcccctttcgagggacctaccgacagtttggtctgacgggcttttactttgattcccataagtttaataatttagttaatcagttggcgaaatttattttattccgtcctgtagggttatgaattaattcaccacagattacacagattgacacagattctattttactgattattagattaataaatctgtgtgaatctgtgtaatctgtggtgagtcttattcattcctacatcagaaagaataaatcccgtcaactgattcggttaataatctgtggcaaagataggacggaccggaaaccgacttatgggtttcgatgggttccgatgggtttcgccttacgggtcgcccaaatggcggacaatcagcgacacttgccgggatgtgagcaacttctgcgaacgatgataaccgacggtttccagttccatcatcagcgaaggacaatcataaatccagcgcatcaggcggttggtggccacagcggatgttgaatccggaaagtaaagtagagccagttcgctcttcttcatggagatgggatggaaggacatggtgggagaaattaaaaattaaagaattaaaggcgttccggatatgggagttttttcttcctaactgggaaaatattttttcctaactggagaaatattttttcccaattggagaaaaaaagcggaatcttgcaaacttgcatttcttgcagccccctcacacccacacacgtacatacacgtacgtgaagcgaatgggatcctttttccgaacgacgtttcatttgaacctgtattctccgcgcccgcttttcaccagctgccctttgttcagcattcgcttcaacagcgagtcgagcgtgttggcaggtattccataccgttcacccgcttgaagggcctggctacgggtgaagttgagaggcaacaaatccaggaatgcctcctgcgacgttttctgttgcatggagtcgcccgccggaaggaacgacaggatatgacacgaatgcaggtacagaggttccgtgagtgacaacacggcatgaaagtcatcgctgctgacggtgagatcgaactgaggtactacgccatcctgcacgttctcatgcggaatgtggggtgaaggcaacaagcccgggcatgatttcagcgcttttacaaggtcgtccgccggcttttccgcagcagtacggccgataccgtccgttgccattaacaaggcttcgagcgagcgcatcaatgccacgatgccaatgatacgacagatgttaatggcgatacgtgccaccgcacttttcataggatcgccatgagccgcacccgcacgaccgaatatgcgtgaaaagtgaacgttgaattcctctttctgctcttcggtcagtttcaggttgatgccgcttacgacagccgccaaggtatcgagcaggcatttccaacgttctccccaaagggtgaacatacggtcgtagtcgataccggattcgcagaactgatccacccattcacgaatgggaggcatgcagtaaaacaactggcgcgagaataggccgttctccgccgagggaatgagcggcttcacttgggcaggcgtaccgctaagcaatacgctaagataggatattttacactcccggtattcgtggttggtgcggcggttgtaagccaggcgttcgtggtcgaaactctttctcagggtatcgctccaatgtccgtagtcggtaccgatggcagtgctcacggtgtccgcttcggtttcgcatatcagtccggcaccgttggcatccatcaggttctccagcatgccggctccggagttgtcacccgcaataaggaacatcttcatgcaaggctgttcgggttcgggcttgtttgccttctccttgcccagcatgtcccattgcaccttctcaaggcgataggctttcatcttttcgctgtacgattccatcagcgcgtcgtgcaggggttcagccagccggcgcacccaggtcagcgctcctttgccggaagcgggcggagcgatgacaaaggtttgcaggcacggaaatttgatcttgcggccatagacaaagctcaacagccggttgagggtggctccgaatacagtcattgctcccagcagcaggatgtccctttgggcgggcgattcgccgcagtccaccacttgttgcaggaagagcggccaccggtattccgggaaacagggcagcgagacgaaggtttccgcatcgttttctcgcacgtacgtgtgggtgggtgtgaggaggggctgcaagttttgcaagtttgcaagtttcttgtcgaagcgcacgcctgccaactgggccaggtggaacaccgttcctaaggaattgccccctcgcccattctgcaaggtgtggtcgtaaagtttgtcagcgtcggcctgccgatacttcgcagacagactgcaaagccggtgaaaaaaactgcgtcccgcctcgccgcaactgttggcaatggcgaaggcaagtggcatatattcctgatacgtaggtgcaaggttggctccggcctgttctgcggcaatagtcaactgttcgataatgtcaagttcgttcacgatgataggatttgtaatttgtaattcgtaattcgccctaaattttgcacttcgcttcttcgtcgtatgccaggaagcaggctctcgacatatcggcattggcggtatcggcctttagtccgtgacgccatcccaggtagtcccaggcggtgtgtagagcattgtcgaacgagtgttccagcgtatctgtgagattcagccggtagggcacgaaaagtttcactcctttggcaccgggacttacgaaggcaagatcgggttgtagcacttcgtcagtaaagagtcgatcgcgccacattgcggcttcttcgacagaggcaaggtggtcgatgtctatcacaaagtctccggacggcaccatgatgcactgctcccgacagtacgaaaaaattccggcaggcgtgacgtagggtagtaaagtctgcttttttccacggaatgctttatcgttttccgtatcggcccttactctttgtgtcagctccttcagatgggaatcggaggagatataggcatgaagccccgctacgctacacactccggaaggcactttgttggtgatgggagcgttgaaaaaagacatgatagattctttcatgatattgattctgatttaattaaaactatattttatatttaactgatttatgtcaacaaagatacaggatataattcatcctatacactgcattaaaagccatttactaagcatttataatcattgagtgcttattgatttatcattaaaataattaaatagaatggagagagaaaatataaatatgaacgacaaaccggaaatagagataaagatattcggcggtacgaacatgatagccccgacgggcgctaccgccgttcagaatttttacggcgatcagtttgccgaggtcgccatccgtcccgaagaaaccgagggcattgaaagtctgaacgatgccgagtgccttctcttcacctacgtgcccgacgtgaaaaaagtgcatgagtacacccgacttctgggcgaatgcaccaccgcccacgatctggcgggtgtagtgagcatcatgctcagcgaaccccgcgtgggcaaggacacggtggtgaaaggcaccttcatcgaggttcttcttcctttcgcttcccgactgacatcgggggcaaaggtggacaatgtgagacaacagattaataatatgctgatgaggcaagggagaggaggaaaataaaggaaaactttgtttggagaaaacaggcggattttgttactttgccaataaagcatacgtgaaggagaaaacagatatgatgcagcgacgactttatccggtagggatacagactttttcggaaatccgggaaaagaactatttgtatattgataagacgggatacgtttatcgaatgacgaattccagctctaagtatatatttctgagccgtccgcgccgcttcggaaaaagcctgctcaccagcacacttcattcttatttcgaaggccggaaagaactgttcgaaggtcttgccatagagggactggagacggaatggacccggtatccggtgctgcatttcgacatgagcacggcgaagcacgtgaacagggagcaactggaacaggaattgaatctcaagttattgaagtatgaaaaaatctatggcagagaagaaggtgaaataaatgccaatcagcgcctgcaaggtcttataggacgtgcttatgctcagaccggccggcaggttgttgttttgatagacgaatatgacgccccgcttctcgatgtgatggatgaggagaagaacctgcctacgcttcggaacgtaatgcggaatttctacagcccactcaaggcatgcgacccttatttgcgtttcgtgttcctgacaggcatcacgaaattttctcaactgagcatcttcagcgaattgaacaacatcaagaatatcagcatggatgaaccgtatgctgctatttgtggcattagcgaagaggaaatgctgacccaaatgtctgatgatcttaatcttttggctgacaaactaaaggttacccgcgatgaaatcattggtcaactgaaagggaactatgacggctatcatttcacctggccgtcgcccgacctatacaatccattcagcctgctgaatgcttttgccgatggcaagatgaactcttattggttcggcagtggcacgcctacctatctgatagaaatgctgaacaagtatggcgttgctccccaacagataggaggacgaaaagtatttgccacagctttcgatgctccaacggaacggatgacggatattaccccgttgctctaccagagtggctatgtcaccataaaggactactcttcgttgacaatgctttatacactcgacattcccaataaggaagtgcgcatcggactgatgcagagcctgcttgccaattatctgcaccgatacaccaacgacggtctcaccaccgtggctttgctgtacgaagccattgtcgaagaaaggttggacgatgccctgcgcctgttgcagactttcctttccaccgttcccaagtgcgacaataccgattatgagggtcattatcaatccttgctctatgtcatattcagtcttctgggtatgtacgtcgatgtggaggtacgcacgcctcgtggtcgtgtagacatggtgatgcgcacacctgccattctttatgtaatggaactgaagctggacaaaaccgccgatgccgccatgcaacagattgacctgaaaaattatcccgaacgtttcgctctgtgcggactgccgatagtaaaggtagggattaacttcgacagggaacgaaggacgctgggggaatggaaaatagaaggagaatagaataaaagattgtcatcctatttctaaataatccgaccgattgaatttagtaatcattttctgtgaggcatcccgagagataccttacagagtgggtatgctctgaattgaacactaacaagaatctcatatttcataaaaaacaatgcttatacaaaaaacaaatgtagagggtttggtcatcattaaaccacgccttctcaaagacgcacgcggttacttcttcgagtctttctcccaacgggaatttgaggaaaaagtgcgcaaggtgaatttcgtacaggataatgagagtatgtcatcgtatggagtaatgcgcggactccattttcaattacctccttttacacaaagtaaactggttcgttgcgtcaaaggcagcgtacttgatgtagcggtagatattcgcaaaggatcacccacatacggtgagcatgtggctgtagaattgtcggaagacaaccatcttcagttctttattcccagaggttttgcccatggttttgccgtattaagtgaagtggctgtatttcagtacaaatgtgacaactattatgctccacaagccgatggtggaatcaatatcttggatgaaggcataggaatagactggaaaataccgactgataaagcgatactgagtgagaaagatacgaagcatccgttgctgagggattttgagaatccgtttgagtatgggatggaactttataaatgatgaagacacttgtaacaggctcccacgaataattgagaaagcaatggggcaaaagagggacttaacattagatattgcaaaagctatttgcattgttttaatatattccatatgccttacttttcacatttaaactaatgaatctttggtacatcatctatttttagctgcgattatcaatacaaataatttaatccttttaaggcaagatacttttctgacaagtaatacaaaagagtaatatgtaagtaattataatgagtacatcttcattaaaaaacagagcattgaatggcgtgttttggagtgccattgatcgattttcatctcaaggtatatcattcttgataagcattgtcattgccagattgctcactcctcacgactatggtttggtggctatggtaggtatattcatatccattgcacaagcatttattgacagcggactttcttctgcaattgtccggaaaaaagacaggacaacagttgacttatctacagccttttatgccaatattatcatcggcgtattgtgttatgcgattttatatcttgcagctccttatatagcccgattttatcaagaagatgaattatgcagtatagtaagaatcatgggaattatctttttcctattttccttttccaatatccaacaagccgttctatcaatcaacattgatttcaaaaccaaagctaagatttcccttctctctgtaattgtttcaggaactcttggcatcatttccgcatattccggattaggagtttgggctctagttatccagcaaacagtatatgctttattaagaaccattctgctatggatatttgtcaattggcgaccgattggaatcttttcctggaaagcattttgttcattattctctttcggatctaaaatgcttttaaccggtttattaaactctatctttaacaatctttattccattgtaatcggaaaaactttttctgcatctagtttgggttattattcaagagctgaacagtttgcacaattcccatcttcaaacatgacgaatattgtcaagggagtgacatttcctacaatggcattgatacaggatgaaaaagaaagacttaaggctaatttctataagatacaccgcgttatgacgtttataattttcccattaattgtaggtctagcatctgttgcctctccattgatattgttgttgctgtcaaaaaaatggatttattcagccaaacttctgcaaataatatgtctggcactcatgtggtatccagtttatacgcaaaatctgaactttttagaggtaaaaggatatggaggatatatactcaaatctgaaacaatatcaaaaattgtcagtatgacagttttagtaatacttatcccgatgggattggaagctatttgttggggacaaatgttatccaatataatatctgtttttgtcagcagctattttgtgacaaaaatcacaagggattcttatgcaaaactattcgctcccataagtatgaaccttttttcctctttgatgatgggaattatttgtagtctagcacaaaaactatttgtgctccctgccatacaattggtagtaggtattttagtaggaggaatggtctatctgattttaaactattgcttcaatcggtcttttttaatgactttttataatatactattcaaaaaatgaaagtagctttttacctacccaataaattttgctatgcggattgttcaaacgtcgatttaggaaatccgggaataggtggtacagaatacatgataattgctttggcttatcatttgtctatttgtcagaagaaacatgaaatcttaatttttgcgcagcatgatactcagttaccacaacattgcagcattgtgaaggtggaagatgttatagaggctttgtatgcctgtaaacagaaaaatgtggaatgtctcattgttcagaattcacaggaaactaataaactgtttaatgaggatttaggtggattaaagttggttatgtgggcacatagttttatgtccagaatgcaatggaatctttatgcccggtctgccaatgtgaaaagaatagtgtgcgtaggtaatgaagagttagaactttattgtgatcataaggctttcaaaaaatccacagttatttttaatgctttccctttaccatccagtacaccgtttacaattccttttcaagaaagagagaatgaagtcacattcttggcaagcatagtaccccatactcacttccatttattggcaaaagtctggaaagaagtgattaggcaagttcctgacgcacatttaaatgtcataggatcaggaaatttatacaacaattccaaagctctgggaaaataccaaatcgcacaaaatgagtatgaaaattattttatgccccatttactagatgaaaaaggaaacatactccaatctgtaactttttggggaaaattagggaatgagaaatatgagattttgaaaaggactaaagtcggtatagccaacccaggaggttatgaaaccttttgcatatcagcagtggagatgcaactttatggggcaaaagtggtatcatgtaaaaaaggcggattgcttgataccgtatttgacgaaagaaatcttttcgtttcggaaaaagaacttataaattgtattgtgaacgctttgaaatgcaaacaacataattatgaggaagtttttttgtttttgcaaaagagattttcatttaacatcgtatgtagagagtgggaaaaacttctggtggaagttgagaacaatattcctcaaagaacattgcccccgaatagtaaggctcccacggcactccaccacttacgacacttcaacagaaccttaaaaaacattactccttttggcttttattggatgccgtgtatgaagttttatgaatccgcatatcatcgaatcaaacaattattttaatgaagcctttgatttctgttatagtacctgtatataatgcaggcttgtctattgaaaaatgtgcaaagagcattttaacacagactttttccaatcttgagttgatattaatagatgatggaagcacagacaactccttattcatatgtcgttctttagcgtcacaagacgcacgtattactgtccgacatcagtccaatcaaggggtaagcaaagcgagaaatttaggcatatcaataagcaaaggagaatggatagcctttgtggatgcggatgactacctatatgaatactatttaagcggattgctgatgcagactacagattgtgaattggttatcggaggatataacaaagtactattgtctgagaagaaagagtttccaggagtcttattcccagaaatggtactatctaaaagcaatgtcgattgccaagagatatgggacaaagttttgctctatggaacgccgtggggaaaattgttcaaaagttcactgataaaagagaacaacataatttttcccgtcaattttacattacacgaagaccatatttttttttatgaaaccttattgcatacaaataacattagactgacaagaaattacggttataattatgtgaattatggcacagaaactttatcgcggaagaaggcaataccttccgacttgaaatgtaatgctttttatcaattatcagaaatgctaaaaaacattatacaaagattcaacctaaataaagaacatcttcctcttgctcaaaattttattatacggctctacatctccgctattatcctttgctatagaaacaaagattatgaaaggaaatatctgaagccaaccattgagctacgaaaacgaattcaagtttatcaccaccccatatccatgcaaggatattccataaaatttatattggtatatttaccattctgtatccaacgttcaatcttaaaattactgataaaatgagcctgtatcaatttaggagaaaattatcgtttttgatttcactcccgtattctctatttttcaatttctattacttaccattccgacaagctataaagatgcccatcatactatattccccacatttttggtctctgaaaggcagggttgtcatagatgcccctcaagttcgtttcggtatgattcgcttaggattattcaatgcaagcatcaataatgaaaaagggtttgtatggatgaacgaggctgggactgtgatttttcatggaagcttcgccgccggttccggttctgtaataaaaataggacatcctcgtgctgtgttggaaattggagataatgtaagtaacgcttcttctctgaaaatagattgtcactatcgcataaacattgggaaaagagggaaatttggatggggagtcattattatggattcaaatttgcatcggttaaaaaatagtgatggcacttgggtaggaaaaggatatgacgctgtagaaataggtgaaaatagttggatctcctcacaatgtgtgatacttcccggaacaaaatttcccccatatagtgtctgtgcattgggatctgttttgaacagagattatttgaatggagagaaaggattatatgctggaaggcctgccaaactcattaaaacaggcatttggagagatatggcggacaatactatagattataatgaaatataaacaagcacttattgaaataagggattccaacataaagctactacatctcatgactctgtttttagttttggtagcccatgctgattattaaatatcttaatattattctcacaacctccatttaagtctattcaaccaacagactcgaaattgacaaaaactatagatattaaatatgaaaataggttttatattatcttacgcagctttttcttctacaaacggtataagaagtcaagccataagttggaaaaatggattagaaaaactcaatcatgaggtagcattgattaatatgtgggaggataatcaatggtgtcaatacgatgcaatagttatatttggatttagcgtatattcgtgtgatttcattaatattctatctaccgtacataaaaatattttagttgctccaattcttgacccaaattatagcattcttgccttaaagatttattcgagatggggaaaccgaaagttgagactgactaatccgtattactctttgcgtcaagtcaaagacaaagtacgtgcttttttaataagatcgaatttcgaaaaggcatatttgattggtggatttggcataccaaaagaaaaatgccatattgtgcccctatcatgtggaataagtaaaccgaaagaattatttgagaaagaaaaattttgcctgcatataagtttattatgcgatgagcgaaaaaatgtaaaaaggctcattaaagcatcaaaaaaatacggatttcgacttgtattggcagggaaactacgtaatcaaaaagaaaaaaagttattgaatacctggattgatagtgctgacaatattgagtatcgaggatatgtatctcacgaagaaaaaatggagttatataccaaagcaaaagtttttgcacttccaagtacaaacgaaggtgtaggcatagttgcactcgaagctgccgcaatggggtgtgatattgtaataacgaaattgggaggtcccaaagaatattatagcaatatggcaactgttatcaacccgtataacgtggatgaaataggcaaagctatatgcaaagcgctggatactaaaagtttccaacctaatttagcagaatatattaataaaaattactccatagatactatatcaagacatttggagcagattttatttcatgaggagaaataaaatgtttagtataaacttttcatctgcattggaagtaaagagatggtttcttgctttgttattgataatgtttaatacacattatttattggtagattttgggctcatctctataaccaaactaacagttatggcattatgtccttttttactcctgtcatttcataaaaatatatctaagccattaataatagcattattatatctcttagctatatatatatgcgctttacagcatccagcacaatttcgtatgacgactattatatatactgcattatatgtctttctgctagtgactttcacaacaatattgtatagtgaagaaaatgtactcactttgaattttgcaataaaactacttaatagactcatatggatatacattctagttgtaattgcacagcagttatttatattaattggaattcgacattttacaccattaaatttgggtggagacagttatttagaagtaaatagggttcccgggctctctttggagccttctcattctggacgtatcatgtgtgttgctttttatgcatggctgaaactgaacgaatttcaaaaaggagtaaaaatagatatacattatctctgggcatatgagagaagatttgtcctgacatttctttatgcgatgctatttatgggtagtgcgaccgctgtgttggcactaattcttcttagtttctatttcataaacagacgttcattgttaattctcccaatagtgctcattgttgtcttattcataaatgaaagggttgaatttaaagcgcttaaccgtactataaaaatgatagctgtagtctcggaaggtgataaaaaaagtattggaaaaactgatggaagcgctgcatatcgtatatatcctataataaatactattgaatcagatatttcaaaaaaagaattttggattggtaatggcattgattcagctaaaaataaattagggttaatcgatttaagaaaaagtaagattggaaatatcaatgattatggttttatctgttacacacttttattattattgatatattcatgcgccatttatcgttttttcagtttggaaacactattctttgttatactgatgtcatgtacattggcaaatgtatattatagctgggggataatgattatttttactataatccgctatttccaaataaaatacgaatgtggcaatttaagaattgaggaatgtgatgaaacagaatgatttgacacttgctatctgtatgtataatgcagagcgatatattgaggaaacccttggttgcgtaatggaacaaaccatacaaaattttcacttgttgattattgatgattgcagtacagatggcagtctggataaagttgagcgattttttgctaataatatgcggcagtatgaactaatttcgtttgaagaaaatcatgggattgcttatgcacgcaattatgcgttgcatcatgcaacaactaaatatctgatattcattgattccgatgatttgccattgcctcagttattggaaaaagaatataatttactgaagaacgatcaagaactgatggccgtcagttcttggttgtcatttattgacacaaaaagtaacctcattggaggtggcttatttataggtgctaccaacaagcaatcattcagaaaacacgcagaaagaaataaacttatcttcctaccaatacaaaccatgtttgaaagaggactagctattcaggtaggaggatttcaatgtgagggtttccctatcggaaaacctagatacagagattattgtgaagacttagacttgtggacacgcttgagcgacctttacaaagagaatcgctatatagtcacaattcccgaagtactatattattatcgtaaagctgatagtctatcagccaatcatttcaacatgattatcaagatgcgttacactaaaatcaaccttcttcgccgccgaaccggacaaaaagaactgacctttgaagagttttactctagactttccaaaaaagaaatgaaaagccttcagcgtaatgcaaaagccgctgattcgttacgaaacggtgtgttctatttgaaaaaaaaatcactaaaggggatatggctaattatagcatcactatggtataaaccttcgtatttattcgataaattaaaacataatataaaataaaaggcatagcgatcttatgagaaatacacaattaccaaccattatagcaactattttctcgtttctaaacgaaaatgtagagtatgcggtacttagaaattatgatggattacctactaaaaacaaaagtcgagatatcgatatcctgattgatcgtaattcattctctaaaataaaaaaagatttggttaaacttatcgaaaagtcaaacttcaaaattataacatactttaatagcgaccgtatttgtacgtttgtatgcggtcaatataattccgaaccatccatatttcaattggatttcttctttcacacatcagcatttggaacaattttactcccaagtgaatgcgcactgaaagacagagtatataacggctggatatatcatgtgacagaagaatatatgtttttagataaatacttatatctaaaatatataggtagtgccttccctgagaaatatagttggctcaaatctaaaatgtacaacaacgttgaactaaaccgcatattacaagaacttttcaaaattgagtcgcttgacattttggaggctatgccaactagtaaatttaggcatttagttttgagaagaaatgcccagatgttctttaaggctgatatgataaatcattgccgtttttatatcttatatataaaaaattatatttttgggaaaggttatagcataggctttactggaccggatggtgtcggaaagacaactgtcataaatgagattgaagcattcctgaggactgtttacagcaatacacagctataccattttcgcccatctatgtttggaaacctaagtgatgtggctcattctgccggtataaaaaaaacagtggatcggaattattctaaaccacaccgtggtaataaaacttcaaaattcagttcattcctgagactgctatattactcgattgattatattttgggatattatagtcagattaaattaatcataagaaaacgaggaattataatattcgaccgctattatacagatattatctgcgacagtcggcgaaccagaatttacttaaatcataagtttcttcaccattttggtcgtttttttattccctcacttaattacaatattctgctgacagctgatagtaatacgattcttactcgaaaacatgaacttgatagagagggaattgaatccattaacagaaaaatagactatctggctgcccaaaagggatattataaagtgctaaacaatggtacaccacaagaagctgtaactaagatattacacatcgtttttgaccaacaacatcgtaagaatttgaaaaggttgaaaaaatgataattcaatgacagcactaattacgtcctaaaaacaaatcaacttcatgatatgatttaattcaataatatcagaattgcttgataaatagtcatctaagaatacttctcgttgccatttacattttaaacaaataatcaccaatattaaaagtatctatgattcccaacaaaatcccactctatagaaaagacaatgcacatccttaatctaggaacaagtaccagtaatagattttattctattcagttttttcttatgagataattcatttagctcaatagttaattaggtaaatgaattaatcaattgatgttttgttgagatgaaatttgaatgaaatacgcaccaataggtgcactagaaacataaccattcgtagctcccctgataagaattacgtaataatagcgacttgttctttaatctctctgctattgggaattgctatagcttttatcgtcaatcgcaatttcctccttcatacttgatttaagaaaattaaaacaacaatgaacaaactaaaaatattcgtttccgcctacgcttgtgaaccgggtttaggcagtgaaatcggtgtgggctggcattgggtactggagatgtccaagtactttgagctatgggtgttaactcgtaagagtaaccaatcttccattaaaccttggattactaaatatcccgaatacaaccatattcatttcctctattacgattggcccaagtgggcacggttctggaaaaaaggtttgcgaggcgtacgcacatactacaacatctggcagtattgcaccaatgacattgtgaaacgaacaatgcaagaaaatgacattcacatattccatcaccttacttatggcaatgtgctatggaaggtgagcaaatatggacaaatgcagttcttcgtatggggaccagtaggtggactggagagtattccagaagaatattctcgtcattacaataaaaaatcacaaattatagaaagaatccgaaggatagcaatagcaatgacattttataacagagcgtttagacaacgttgtaaacaggctaacctgattctttgcaaaacagaaataacccgtaatcgagtaccacagaagtatgtagacaaagcaattctttttactgatgtagcaacagacatctccaacacatcaagattatctaggaaagaaaatgatataatcgaatttatcactataggacatttggatgcatggcgaggtttcgacctaactattgaagctatggcaaaagccataaaagaaaatgctcatattcatttaacaattgttggagatggatcggacaagaaaaggcttgaaaaacttattaaaagatttagtctagaaaaagctgtaacattgactgggaaagttccaatggaaacctacaaaaaaatgatggatagagcagatgttgtgatcaacgctgccttgaaagaaggagctgttactgtatcattcgattgtatggctatggggaaaccactgatttgtttagataccactggttatacccgttactttactaacgaatatgccattttgattccgagaaccggaagaaaagaagtcattcagaacataaaagagggaatagtgcgcctcagcgattcgaaggagcgaaaaaaacttggacaaaaagcacaagaagcatctattaaattctcatgggagaatcacgggaaagaaatccgggatgcgattgtcaatgcttatatatcttactcttctaaataaagcaaatgcaagtcaactctattttagaacgtttcctaataaagggagcgggtaaacatctatatcgtttttccaacgctgacaataaaacttggctgatgcctgcacataatatgcaggtggcaatgaatctttaccaacctagcggacggaatggaaaaattatgaaagcattgtttccatggttgcatcacctactgatcatccgaaaaatcatccatgcagaaagtgtgtattgtgatataactgatgagttgaaacggttattttgccagttattccacgaaacagaaattgagttttcgatcttttgtggtactccttgcatacatcaaaagattacaatgcaaatcagcaaaggaaagcatattctaggttattgcaaaataacggacaacaaagaaatcgctctcttattcagaaatgaggccaacattctgaaagagctgggaagaaaaggtttgaaagaagtacctatatgtatattctgcggggaaatgacagacggaataaagttgtttgtacaaagtacagcaaaaactcagaagtcgcaggttatacatgaatggaccgcactacatgagaattttctcgacaatctctatcaaagcacccatcaattcatcccttttgaacaaagcgattactaccggatattaacaaatttacagttacatattgaatggctaccgcaagaagtgaatggtacattgctaacgtctactattaatcagatattgttacactaccaaggtcaggaagtcgatttttctgcctatcacgctgacttcactccttggaatatgtttatggaaggcagaaagttgtttgtattcgattgggaatatgcacagctcacttatcctcccaaactagatagatatcacttctttactcaaacggcttattttgagaagcattggactatttcacagattattgaatatataaactctgaacaagggaaatggatagaccagaagatgtattcactctatttgctagaggtgatagctcgtttcacagttcgcgagaaaggaaatataaacggaaagatggctgaatctttccaaatttggatagctttacttgaatatttacaaaaatgactcgtattatctgcttccatctctttaacgactacagtggcagtcccaaagttctgaaaatagtattagaaggattgctcaaaaagggttaccaaatcaatttgattacctccacaggtggtgcattggacgaactactgtattacaaaaacttaagcaagcactcttacccctatcgattttcaaataacccaatagtaacaatgcttcgctattacatggtacaactatatacgttcatattgacattccgctggctattctataaagatgtgacattctatatcaacactttgctccctgttggaccagcattagccggtcgtataatgggaaaaagggtggtttatcattatcatgaaaatgcatttgtaaaggggacattctacaaggtactggctacgatcatgcagaagttagcacacaaaatcatctgtgtctcggaatatcaagcatcattcctgcaacaaaaaaaatgtgtaataactgttcctaatgctttaccacagaatttcgtgaatagactgacaccaaacttccaagcagctttcaagcggaaacatatcttaatgcttggctcgttgaagctatataagagcccgttagaatttattgaattaaccaaaagactacctcagttcatttttgtattagtaataaacgatactaaagagaatattaatatcttcataaaggaatacaaaatcaatataagcaaaaaccttactatatatcctcaacagaatgatgttgtacctttctataatcagacttcactcgttttaaatctttccaacaagaaacagttcgtggagacattcggactgaccgcattggaagcaatgagtgccgggctaccagtaatagtgcccacagaaggaggaattgcagagatggttgtggatggagagaacggttacaagatagacgtacaaaatcttaatcagatagccgaatgtataaaaacaattctatctgacgaaactctttatatggaattagcccaaaatgcactcgcttattccaaaagattcagtgaagcaaagatggtaaatagcattgaaatgatactaaacaggaaataaaacaatccttttatatttatgaaacaagtagctatcgtaggcatccaaggtgtgcctgcaaaatatggcggctttgagactttggtggagaacattattggtgataactgttgctccgaagtccgttataccgttttttgtagtggtaaggattataccacacgcatgaaaacctacaaaggagcacaactgaagtacatcccgctattccatgccaatggggtacaaagcactccttatgatattctgtcgatgcttagatgtttgcgaggttatgataccgtaatcatattaggtgtgtcaggctgtgtttttttgcccgtcttcagactgttgtatcggaagcaattaatagtgaacattgacgggttggaacaccggagggccaaatggggtaagtttgccagatggtttctgcgaacaagtgaagcgatggccgtgcgctatgctgacgtaatcatagccgacaataaaggaatacaggactacgtatggaatacgtatcataagaaagccgaattagtagcctatggaggagatcatgcacaaagaaatgtcaccgaagaaaggcagaacgaaattctgaggcaatacggaatcgctcccggaaactacgctgtcagtgtatgccgtattgagccggaaaacaactgtcatctgatcctgaaagcctttgctacttctggaaagaatctggtgtttgtgggaaattgggaacggagcgaatacagccgacgactcaaagaagaatattgcagtcgaaaaaatatacagatggtagattctgtgtatgacctcgatatactctatgcactgcgcaaccaatgcaggtgctatatccacggacatagcgcaggcggcacaaacccttcgttagtggaagctatgtttttcggcaaaccgattttagcttacgacgtgatttataatcgtgagacaacagaaaacgaagctcattacttcaaaacaaatgaagaactggtagaattgctacatgacagccccgaggacggatacaagatgcgggagattgcaaagcaacattatacctgggcttttatagctcaacaatataaagcattactttcatcccacaaataactaaccatcttcacaaaagaaaactcatcagtaaaatattttataagctatccgtacagatcgaattatttatagcggcaaagtgccggaaacaatcaccctacttagcgattgtttccggcactttctttatagaagagccataagaaagaaaatattcatcattttcctaacgtccagttaatagcattcctgaacatcttcgtgaaatcttccgtctcatacagcctcttgctgtgccctatctggaaataaacattgcgcgcttttttactttcgttcacccataccacaggatgatcgcccatcttgatatccgaagcaggcgtataggtagcctcatcaacactggctaacacacgcacattcggacgtggactcttgtcataagtgtaccactcatcatcaggcaccacgaaagaagcctgcactcccttcatcaccgggtgtttcttatcctccacaagcaccgtaccatcagcaagcggcgctatataattctggaaacgtacaccacccataaaatcagaaaaccattgccacagtggaaaaccgtcaaactcacccaacaaagtggcatgatggaaaccgatccaaccacctttaccttcctctatatatttaacgaaagtatcttccgcttctttcggccatgtataaggaggataatccaactggataatcagattgaactgggacagataagtctccgtaataggtttggcattgtttatctcggtaatgctgaaattcatctttctactttcatcagtcagccacttcagacccgcatccgtaaatccaccatgctgaccacctctttccgtcaagaccagcaccttagttctatgcttcttaccaagcagattctcagccaccgtatgacgcaaatctccttgctcattatcaccactatagtcccaatacataccacccaataaatctctatccaagatatattgacacttgattgccagtgaacgggcattttcaaaaccaaataccagcgtatcattcttattaaccagataaggaacctgggcaaccgtatcccacttttcagtataatcaccaccggtacttcctactttattaaaatcctggaaactggggtatccatctccgccacgaccataaaaaggcatccccatcaccagcatggaaggtggcacaccggctttcagatgcgcagtaacagcctcatccgacgtaatgcctccactgtttgcagaccgataaagtgccgaatggtgtttcggtgcagaggccatgtcataagccatgatattcacaaagttaataaaaggaagaatagctttgaagtcgatatatttcgctgaagccacagtggcaagtgtcaattccttctgatcacctatcgctgccctgatatctttcatcagaagtgtaaagttctccgtgtcatcgggtgaagctgaaatgttcgccattgaactcgtgggatattcccaatcgatatcgatgccatccagatcaaattccttcactacccggtcgcaatccttagcaaatgcccggcgatattcatcattggcagccatttcactgaaacgtccactcccccatccgccgacagacagaagtactttcaattcgggattttgcttcttcaggtccacaatttgtttcaagcgttcttcattgtcaatcctgacgccatcaaaactttcgtttacatgaccgaaagcataattaatatgcgtcatgtactggggttctggcacgatgttactccaagaagttacatacgccacaatcactttggaactcaaggggttcgctgtgctttcccccgacttggtggtgctgcatgaagccaatatagctaaagcagccgccatcatcattctaatctttttcataagtattataattaatcagctgtttgacgaatacgtgaacctatcaatgcgtaatagagcatgaatatctcgcccaaaagtacaataaaccaagaccatctccaacttccgagcacatcagccagtattccctgcaacaaaggcagaatggcaccacccactacacctatcataaataccccggaagccacagatgtatatttgcccaaatgggctacggacagggtaaagatggctccccacataatagaatggaacaatccgactgccgtcagcaaccacggattattcagaaggatagccaacaaagcaagtgctcctgccgaaaccgtagttacaaccaactgcacacgaggagaaatcttactcaaagagcttcctaccaaccgccccacgagcatcccgccccaatacagtgtagccattaatgccggagatgcataattcatttcaatggcatacagattgatattggcacctatacagacttccacgcccacataacagaatatagcacagactcctaaagtgagatgccggaacgaccagatactcttttccagcttctcacctttctctatccgagttccctgtatatccggcaaagatagtttcattaacaggaaaacaatcaaagaaatcaccactatcagcaccaggaacggaatcattaactgatctatccggatatcttccattgccaggccaccgaaaacaacacccgtaacaaaataaggtgccaaagtggttcctacagaattggctgagccaccaatggcaagacgttgaatggcttgcgtacctttcacatggcaagccgtgagataaggattgataaccacctgcaagatggtagcagaagctcccaccacaaaagaccccaaaaggaaaataaagaaaccaccgggaataacatttcctccagcatgccagttggcttccggaaagaaaaccgtaaaataagaggaagcgaaaaataatcccaaaccaaccaccattaccaacagtccgcgcatcagcgtaactttatagccatatttactaatccaggacgaccctacccgaccacagaccggataagccaggaaccaggagaaggtaatcaatgtggcgaatgtgtttttcagaccacccacttcggcaaggaatgtttctttcagcggtccctggaactgagtattggcagtagtgaggaaacctacaatgaagaacaggaataccattgtgataaatggtcccatatagttcacttgtttttcttgttgtgtcatagtatcatgtattaaataaaagaaattcgcaattcgggtgaagctgaagtaccgatgcaggaacttccggtgtaacgggtccctccagcattttcctgacgatatccgccttgttcgcacctttggcaaccaatacgattttacgggcctgcatgatgttccggattcccaaagttgcaccacctagttctttctccggcggtgtattcgtttcccgtcggatacgttcttccagttccgtattcatttgagtcacccatgtttctcctcctaagggagaaccaggttggttaaaacccagatggccattctcacccaatcccaaaatcaataggtcaatgcctccacgactctctatttcttgctggaaaagcttgcaggctttgtcaaaatcatcagagactgtaggtagcatcaagaagttatcttcttggatgcccagcgtatcgatcagttctgtcttcagcattgtgtaacatgcacctgcatactcacggggtacattagtcacctcgtccagtccgaagaatgtaacagaagaaacatcaaaaggatatcgggaatagatttctccaaccaggcgatgcaggttgccggtagtacgccctgtagaaagtccgataacactttccggcttattcagaatttcaccaataatgcgccatgcagcgatacaatcaaattctttttcactctttgctatagttattttcatgagttcactttcttatcactaatcattaatcactatttacatattcatcgccaccgcgcctgcacccagcaaacctataaaacccgggttaagtttagtgataaccacgccattggttacaaagcgcatcgtagtaggatgaagtttctccagtattttctcatgaatatatccgtcggacacaatgccgccacccaataccaccgtatcaggatcagtaacccgtaccagattcatgataagatttgccaaagcttccgaggcattttcaaccagagccacacacaaaggatctcctttctggcttagcgcaaagacttcgctgatcagtacccgttctcccttttctgccgggatatgcagattggtttcataccggttgcgaagaagacgggcgcaattatcaaaaccgataccggcagcaatggcctccacacaatccattcttccacaaccacacttaatgccaagattcactcccacacgcacgtgccctacctcacccgcattgaagtgactgccacgtatctgcctgccattgataaccgtaccgacggcaatacctgtacctacattaatataaataaagttcttagatatttgtccgaatccccagacacgttcggcgcgagtggcacttttcacatcattatctatatggcaggggataccataaatatccgacaattcctttgccagcgctatcggttgcgtccgactcggatcaatctgtaaccaaatgccctgattaggatctacacgccctatcagcccgactcccataccgacaggtttctggtcacaccaacccaccgtacggatataatcatcgagtgacgactttatgatttccgaagctgcttgctggttaaaatatccggagtcatatttcttataccttaaaatattaccatggctgtccacctcaccaatcagtagcttggttccacccaaatcaagacctaaataagtttccattctttattgcgtttttaatattgtttactgtccacaatattacgcactatcaggaaaacgggagttgattatctaacaaaaaaggtttgatacctgtccgtggtggttaaaaagctatctttaatactttaaattttgctgggactcgtaccaaactgctttttaaagcaagtactgaagtattttgaatcagaaaatccaaccatggaagatacttcaccaatcgagaatcttcgggaagccagaagttctttcgccttattcagacggacaatacggataaaatcattaggtccctgcccagtcaaggtcttgatcttattataaacggaagtacggctcatgcccagcatacggcaaaagtcgttgatagagaattctgaattagaaagttcttcatcaatcacttccatcactttatccataaactccttgtccaactggctggtatagtccgtatcttccggtggagtatccatggacagcaccgtatcgcgaagatgctgcctattctggaggatattccgtatccggactttcaggacagagaggtcgaaaggtttaattatataatcattcgccccggcttcgagtccgaatatgatattctccctttcactcagagccgtcaatagtatcacaggaatatggctcgtatcgacagaagatttcagtatacggcacaattcatcaccttctaacacgggcatgacaatatccgaaataatgatatccggattgatctcccttgccatctccaaagccttcccgccatcgggcactccgattactttatattctgatgacaaactgttcatcagatactccctcatatctttatcatcctcagccagaagcaacacattcttaccggcatcttcttgttccgggaaggtatcaacagtgggtatttcctgcgtattttcttttcgctcaacaactatccccaactttatcttcaacgggaatgtaacggtaaatatcgtccctttaccttccgtactgctaaacgaaatatcaccgtgatgctgcttcacaatcctccgtgtaatcatcagcccgatacctgaacctgtttcctgaaagttcatggcattctgtgcccgataatactcatgaaagatatttctttgttcttcttttggaatgccgatacctgtatcttttacttcaatcgaccatttcttcttcgttgttcttaccgtaatatagataatccctttctccgtatatttcaaggcattcgaaaggagattgtccacaatatgatccatcttatcccggtccatccacacctgcggcatgtccgcctctgccttcaactgaatttccactcccttttgcaggacggccatgtggaactccgctatcttttcttccagataagctttgatatcgtaaggagagactttcagacattcggcatgcagttccgttttctgtaagtccaacaactgagtaaccatactcaacagtttctcggcattcttcacagctaccgccactgtcttcttactttcttccggaagctcccgctgtgcttcaagttcgctcagaggtgcctttatcaagctgatcggggtgcgtatatcatgcgctatgctgataaaggaacgtatcttctcctttacccggtcttcattggctttatgcctccgatactgcacaaagatataaacaaagacagaaagcaatataaaataaaacagcaatgcccaccatgaaacccagtaaggactactgattaccaccttcagactgcgctcccctatctgttgcccggtatatttatcgaatgcccgcaaccggaatgtgtatgtaccggaagaaaggtccatatagttcacgctccgcaccgaattggaatgttcccattcttcattatgcccctccaacatatactcatacctgattctgtgcggagccgtaaaattgatggcagagaaagaaatggagaatgaattctggttatagttcaagccgatcttctgcgtgtcgttgatattagtctttaaaagggaacctttcatacccgccttcaccgattcataaagcaatttaaaatctgtcagtatcagttcgatagggccatgctgtccgaagttcagcgaaggagaaaaggttatcactccctccgccgtaccaaaagcgaggcatccgtcgtccagcctgaaagctgaattagggttataatatccccaggtgatatccagaaaatcgtttgcgctgatcagaatatcgtttgataagtccaggcaatagagttctttttccgtactgaaccagatacggccatcgttatcttccaacaggctattaatggaattggaagcaagaccgtcatccgtagtataggcacgtgcctctcctctatcaggcttgaaacgtaccaatccttctccgtcggtggcaagccatatatccccggatgaagattgcaataagcatcggataggatagtgcagggaaatatctccgaacttctgatgccactgtgcttttcccgtagctttatcgaaaacagccagaccactacatcctgctatcagtaatgaaccgtctctaccggacttcaagtctcctacacaatcaatcggataataggtataagtatccgtcagcatattgtagcgtgtaaattcgccttcaataccacctatccaaagataatcaccttccgcatggatagcataaatgtaatcggtggccacacctttgtccgaaccggttttccgtttttccatcttttgcaccttgcctgttctcttatggatagcataaagaccgataccatatccaccgacccaaatgtttcctcttgaatcttcagcaagagccaatacaactttagaaccatgctccgtaccatccagaaagtgcttccattgacgttgtttgttccggtaaaggctgactccattgtttgtgccataccagcaatctccctcggaatcctgaaatatgacattgatatgatccgatttcagggaattaacattattctgttcatgcttcattcttcttacatcaggaatattggggtctaaatagctgatgccattggtggaggtactcacccaaatgccgccaaattcatctacacaaatatcagaaacagtattgccattcagacttctttcatcatcttcattggtgatataatgcttcagaagccgttccgtagttctgtctatctggaaaacaccggcaccgtcagctcctatcagtaaggtattatcaggagcctgtgcaaaagtgcgaatgggaacatgggggatgaactctttgaaagaccgtaccttccttgtcgatttatccacgacaaaagccccgtcggaaaaggtacctacaaataatttatctccgaaagcacacaatgattcgacatgcatttccacgggaagaggtattgcttcctctgaagaaaaaccggttttattcgctcgcttcaaccgatagatacctttattggttccggcacagaattcagtatcatctatctgcacaatgcaattgacgcattgtcctttcaacccggcaagcaataagccggactcttcttcccaacagtaaacacccgttgacatacacagccaaaggcggttatccacatcaaaaaggatattattcaagaccggagaagaaagatatccggatgcatcgacacgcagttgaaaagcatccgtccgattatcgtacgcgtatatctttccgttcttcaaggcaatccagatattccccgaataatcacaggtcatggtagtggaagacaggatatgatctttggactccaccgtttcgtccagctgatagtgttttatttcattgccgtcataccggtctacccccatatgggtataggcccatataaaaccggcagaatctttactgacctgaaatacctgccggctgctcaacccttcttttatactcaggggacgaaacgaaccggcaaataaagtgaagcattgaaggagaaatataagtaaggtgaaaatgtattttatcataatatcgttattatctgtccgcattacacatttataggtttcgcggatgcaatattagacacaaatataaaaaaagtggtttaaaaactatccaaataggtttgatttctattacttttgtccatcaaaccaataaaccgtgataggccatgctcagcaagcttaaattaaaccagctctatttcaaagacacgcagttcgctaacctgatgacgcgacgcatcttcaacgtccttctgatagccaatccttatgacgctttcatgctggaagacgacggacgcattgacgaaaaaatctttaatgaatatacttcactttctctgcgctatccaccccgctttacccaggtatcgacttgcgaggaagccttggcacaactctctaccgtaccattcgatctcatcatctgtatgccgggaacgggagataacgacagtttcgatgtggcgcgacacatcaagagcctttacgaacatattcccatggtgatactgacccctttcagccacggtatcaccaaacgcatcgccaacgaagatctgagtcctttcgaatatatcttctgctggctgggaaacacggacctactggtgtctatcatcaaactgatagaagacaagatgaacctggaacacgacgtaaatgaagtaggtgtgcaggtgattctggttgtggaggacggtatccgtttttattcatccatattgcccaacctctataagttcgtattgaaacagagccaggagttcagcaccgaagcattgaacgcccaccagcgcacgttgcgtatgcgtggacgtccgaagattgtactggcccgtacgtatgaagaagctataggcatttacgagaaatacaaaaataatatattaggagtcattaccgatgtccgctttccacgtgtggaacgtggtgaaaaggacggacttgccggtatcaagctttgcgctgccatccgtaaggaagatcccttcgtaccgctcatcattcagtcgtccgaatcggagaatgcgctttatgcttcaaaatatggtgccgcctttatcgataagaattccaagaagatggacgtagacctgcgccgcatcgtatcggacaatttcggtttcggcgactttatcttccgcaatcccgacacactggaagagatagcacgtgtaaagaacctgaaggaattacaaaacatcctttttgccgtaccggcagagtcattcctttatcatatcagccgcaaccatatcagccgttggctctattcacgcgccatgttcccggtagctgaatttctgaaacctatcacctggaacagtttgcaggatgtggatgcccaccgtaaaatcatcttcgaagcaattgtaaaataccgtaagatgaagaaccagggtgtggtagccgtgttcaagcgtgaccgtttcgaccgctactccaacttcgcccgcatcggtgacggctcattgggaggtaaagggcgcggcctcgctttcatcgacaatatggtgaagcatcaccctgaattcgaagaattcgataacgcccgcgttgccattcccaagaccgtagtgctctgtactgatgtcttcgacgagtttatggagacaaacaatctgtatcaggtagccctttcggatgcggaggacgatgtgatcctgcgatacttcctgaaagcgaagttacccgaccgactggtagaagacttctttaccttctttgatgtagtgaagtctccgcttgccatccgttcgtcttctttgctggaagattcacactatcaaccttttgccggaatatacaatacgtatatgatcccctatctggatgataaatacgaaatgctccgtatgttgtccgatgccataaaaggcgtgtacgcttcggtctacttccgagacagtaaagcatatatgcaggccacaagcaatgtcatcgatcaggaaaagatggcggtcattctgcaagaggtagtgggcaaccaatatggtgaccgttactaccccagtatgtccggtgtggcacgctcgctgaactattatcctatcggtgatgaaaaagccgaagaaggtactgtgaacctcgccctcggtttgggaaaatatatcgtagacggtggtatgacactccgcttctctccctatcatccccaccagatattgcagaccagcgaaatggaaatagcactgaaagagacgcaaacccgtttctacgctctcgacctgcgtaatgccggacacgatttctctatggacgacggcttcaacctgttgaaactgcacgtgaaagaggcggaaaaggacggagcactgaattatatagcctctacctacgatccctacgaccagatcattcgcgacggtctatatcccggcggtcgcaaagtcattaccttcgccaatatcctgcaacacgacgttttcccgttggcacgcatactgcaactggtactgaaatacggtgaacaggaaatgcgccgccccgtcgaaatagaatttgccgccaccatgagtcgggaacaggacaaatcgggtactttctacctgttgcagatacgccccatcgtagatacgaaagagatgctggatgaagatctgacaaccataccggacgataaagtactgcttcgctccaacaattccctgggacatggaattatgaatgatatctatgatgtcatctatgtgaagacggatgattacagcgcatcacacaatcaagagattgcctgggaaatagagaaactgaaccaacaattccttgatgaaggcaggaactatgttctcgttggtcccggacgttggggtagcagtgacacatggctgggtattcctgtaaaatggccacatatcagtgccgcccgcgtcattgtggaagccggattgacgaattatcgcgtagatcccagccaagggacccacttcttccagaacctgacttctttcggtgtaggctacttcactattaatgcctttatgaatgatggcgtgtatgatcaggacttcctgaatgcacaaccagccgtacacgaaagcaagtatctgcggcatgtccatttcgaacaacctgtaacagtaaagatggatggcaagaagaagctgggtattgtgctcttacccggtgagtgaacatgcaaaagatgccatctgcatcagtaggtattaatctttctgctgatgcagtataatcatcaccacttcgctgggcgcaaagagccggatgttcttattagatgtaccgatgccattggttataatcatcggtatgtgaagcgagttgtatttcaatccggtgcggaaacgcttaccataatgggatggaatgattggtgcgtacaagccaaatagagtgacctgtcctccatgagtatgtccggcaagtacgagatcggtattcgtaatgggaacatcctccgcatagtcaggcgtatgcgtcagcagaatgacaaaatcatcgggtgaaagtccaagtgtgggagatgtgccattcttctttaaattgaaaggattacgtacgccggcaatcaaaatttcttctccgtcccgtctcaaagtatctactttatgttccagcaagtgcataccgtacttctgcaatccacgtacaatatcatcataacaggcttcatagtcattattgcccagtacgacataagtccccatcggtgttttcaccccggacagggcagccaaaaggggctgaacatattcgcatccttcatgcaagtcaccacctatcaacaatgcatctgcatgctggctattgagcaacttgactaaattagtcaatcccttctctttgaaaagacttctataatgcaagtcggatataaaggcaatacgaaaaccatcgaaagcagttggtacatcgggatgggtaaattcataagtccttacccgactgatgcctttatatccggaaccggacttggaagacgaaaacatactgctacccgacttacaggaagaaaagaatagtaaggaaaggacgcatatataaaataaattcttcatcataggcaagtatattattcatcgtaagtgagtacattattcatcataaacgaacgcaaagataggcattttctgtatctttgctacaaaattggtacatgataacttacttctaaaaccggaatatgaaagagatcaaacagaattccccccgtgcatggctccttgcagcccgtcccaaaaccttgacgggagctatcattcctgtgctgataggtacttcactggcatttgccgacggacaattcaaagttgttcccgctctgctgtgtatgctctttgcctgcggtatgcagatcgccgccaacttcatcaacgacctcttcgacttcctgaaaggtaccgaccgtaccgaccgcctgggcccggaacgtgcctgcgcacaaggctggattacaccggaagccatgaaagtgggaatcggtgtcatcgtcattctttcctgtatttccggtctcggactgctatacacaagttggggagaactgcctcacggaggatgggaactcattgtgctgggagtattctgcgtaatatttgccttcctttataccaccatcctctcctatcaaggttggggcgacctactggtgctgatattcttcggttttgttccggtaggcggcacatactatgtgcaggcatatacattcaccccaaacgtcatcattgcttcgctcatcagcggactggtaatagataccttattagttgtgaacaattatcgcgaccgcgatcaggatgccctcagcggaaaacgtacgctcatcgtccgtttcggagaacctttcggcagatacctttacctctggctcggcatcatcgcgacattgctttccttctggtttgcccaaggctggaactatgcaggtatcttcatgcctttcacctacctttatttccacgtaactacctggaaacgtatggtaaagatacgaagcggtaaaaaattaaacagcatactgggcgagacttcgcgcaatatgctgtttatggggattcttcttagtgttataatagcaatcactaaccgttaatcactaacatcatctctttccgtacatcttctcgtaatagtgctgataatcaccgctggttacttcttccacccagtcctgattattcagataccactcgatagtcttcacgataccgtcttcgaatttcgtttcgggataccagcctaaagcggcagtgatctttgccggatcaatggcatatcgctggtcatggccgagacggtctttcacgaaggtaatcaagtcttcattaatccagctgatatcaatctgaccgtcttcatccttcactttcttctttagaacttcacgatattccggtttctccgtcatcaatcggtggatagtggcaatagttaacttcacgatttcgaggttggtcttttcattatgaccgcctacattgtagacttcaccttctacgccttcgcgaactaccaggtcgatagctttgcagtggtcttccacatacaaccagtcgcgcacattgctaccgtcaccataaacaggaagcttcttgccttccagaatattcttgataatcagcggaatcaacttttcggggaaatgatacggaccgtagttattggagcagcgggtaatggttaccggcatcttatacgtatcatgataagccataaccaccatatcggcacttgttttggaagcactgtaaggactgtgcggacaaagcggagtttgctctgtgaagtatccttcggcacccaatgagccatacacttcatcggtagaaacctgatgatagcgtacacccttgcgccaggtaggataaccattttcatccttacccgtcacccaggcacgacgcgctgcatccagcaggttctgcgtacccagaatgttagtaaccaggaaaagctgcggattttcaatactgcggtctacatgactttcagcggcaaagttcaccacatagtcgaatttgaacttggcaaacagttcgtcagccaatacacggtcgcaaatgtcacccttcacaaagatacaacgttcatcatcaatgtctttggcgatggtaccgaggttgccggcataagtcaaagcatccagtatcacaaacttgacatcatcatgctttgccagaatgtgcttgatataattcgcgccgataaacccggctgcaccggttacgagataagtcttcattgatttatgatttataatttataatttatgtttttctcaacggtgagaattggcaagttccatcaggtatgtaccgtattccgttttgccgagttgttcaccaagacgatataactgatcggcatctatccaacctttgcgccaggctatttcttcgatacagctgacgcggaaaccttgtcggttctgtatggtagccacaaagttgcttgcttccagcagactgtcgcagttacccgtatcgagccatgcgaaaccacggccaaagatttctactttcagtgtgccttcatccagatacaagcggttaagatcggtgatttcatattcgccacgggcagatggtttcaaagcggcagccttggcagtgacagtagagtcatagaaataaagaccgggcacggcatagttgcttttgggttgcgcaggcttctcttcgagcgaaatggctttgccgtcggcatcgaattccaccacgccataggcacgtgggtcctttacataatagccgaagatacatgcgcctttttctatcgaagcggcacgcttcaacatagcagagaagccctggccgtagaacatattatcacctaggataagacatcccggttcaccattcagaaactcggcacccaggacaaaagcctgtgccagtccgttaggtttctcctgtatcttataagagaaggacattccgagctcttcacccgtaccgagcaattcgcgaaacatgggtaagtcacgtggagtggaaataatcaacacttcgcgtatccccgccaacataagcgtggaaagcggatagtaaatcatcggcttgtcataaaccggcataatctgcttggaaatagcctttgataaggggtaaaggcgggtggcgctaccaccggcaagaataattcctttcatatttcagttcttttttcggttgatacaaatatagaataaaataagaaggaggaccaagccccacggctctcaatttgctattcaagtcgcaaagataatgcaaagcaaatgtagtacaaaataatttaatttatttttaggagctttcttaacctgccaactctattacttcaagatccttgaacactccattgtcaacaatgaaacggaccattgtgcgtaccttatggaatccggaaatacctgcggcacccggattaatgtgcagcatatccaatgttttgtcatacttcaccttcaatatatgagaatgtccgctaatgaaaagtttgggcggacgcaccagaatgcttccccgtatggaaggatcgtaattgcccggatagccgccaatatgttttatcaacacttcggcaccgtcaatagtaaaacgattgatttgcggatagacttgacggatgtcttgcccgtcaatgttgccatacacggcacggaaaggacggaatgccgccaacttctgcgccacttccagcgaaccgatgtcaccggcatgccagatttcatcacacgtttcgaaatattgcagatacttttcatcccaatatccgtgtgtatcggataataaaccaacttttgtcatctttcttttgtttatctgtgcaaaggtaactatatttgggaaaatcttgatgagtatggaaaaccaatatcaatattttaaacgggacattagttggctgtcattcaattaccgtgttctgttggaagcggaagatgacaccttgcctctgtatgaacgcattaactttatatccatttattcttccaacctggaagaattctacaaaatacgcgttgccgaccataaagctatagctaccggtgctgcacaaagtgacgaggaaaccgtacagtctaccatcgaactggtggatgcgataaaccttgaagtaaaccgccaaatggaggatcgtattcgtatctacgagcaaaagatacttcctgccctgaagaaaaatcatatcattttctatcagagccgaaatgtggaacccttccatcacgacttcgtacgtcgtttcttccgggaagagattttcccgttcctgcaacctgtgccggtgtccaaggacaaggtcatttcatttctgcgcgataatcgtctgtatcttgccgtccgtcttcaacagaaaggattgccgcccggtgctccgggacgtacgcaatatttcgtaatgaaacagccgtacagcaaagttccacgtttcatagagttgcccaaagtaggaaacaactattatctgatgttcatagaggatatcatcaaggctaatctggatgttatcttcccgggctatgatgtagaaagcagttattgcatcaagatttctcgcgatgcggatatactgatagatgatgccgccaacacttccgaaatcatcgaacaggtaaagactaaagtaaagaaacgcaagataggagatgtatgccgctttgtgtacgaccgtgccatgccgcaggattttcttgatttcctggtagacgctttccatatcgaccgccgcgagttggttccgggagacaagcacctcaacctggaagacttacgccatttgcctaatcccaaccccaatatacaccctatacggaagccgcaaccgatgaaactgacctgccttgatgaacgggaatccatattccgctatgtggagaaaaaggatttgctactacattatccttaccattcattcgaacatttcatccacttcctgtacgaagccgtacacgaacctaccgtgcgtgaaatcatggtaacacaataccgggttgccgagaactcagctgtaatcaacactctgatagccgccgcacagaatggcaaaaaggttactgtttttgtggaactgaaagcccgcttcgacgaagaaaacaaccttgccactgctgaaatgatgaaagcttcgggcattaatatcatatatagtattcctaaattaaaggtacatgccaaggttgccctcgttcttcggcgcgacgcagaagggaaaaaactaaccagttatgcctatatcagcaccggtaacttcaatgaaaagactgctacgctctacgcagacagtggtctatttacctgtaaccggatcatcgtgaacgatctgtacaacttgttccgtacccttcaaggtaaagagaatctgaagttccatcgcttactggtagcccgttttaacctgataccggaactgaaccgtctgattgatcatgaaatggagctggcgaaaaaaggaaaagccggtcgcatcatactaaagatgaatgcactgcaagatcctaccatgataaaccgtctgtatgaagcctcgcaagccggtgtggaaatagacctgatcgtccgtggcatctgctgcctgataccggggcaaacatacagtcgtaacattcgtgtcacacgtattgtggatacatttctggaacacgcacgtatatggtatttcggtaatggaggaaatccgaaactattcctcggctcaccggactggatgcggcgtaacctgtaccgtcgcatcgaggctgtcacccccatactggacccggatgcaaagcaggaactgatagatatgctttctatccagctctcagataagcgtaaagcctgttttgtagatgagaatctgcgtaactgttggaaatcagctcatccacaaaaggaaaaagtacgttcacaatatactttttatgaatacctgaaggagaagactgaatagttttgtaacatctatgtaatatgtatgacatttctctgcaacacgatttacgttcctttgcagccagaaataaaatacattattatggaaactatttatctatgcattgtcatcttcctgttcgtccttgcggtgttcgacctcattgtgggcgtcagtaatgatgcagtcaattttcttcaatcgtcagtcggagcaaaggctgcttctttcaaaaccgtactgtttatcgccggtttaggcgtattcatcggtgcagcgttgtccaatggaatgatggacatcgcccggcacggtatctatcaaccacagcatttctactttgccgaaatcatgtgcatcctacttgccgtaatgctgacggacgttgtgctgctggacgtcttcaacacaatgggtatgccgacttccactaccgtatccatggtattcgagttactcggaggtacattcgcattggcactgatcaaggtgcaaggcagtgatacgctgggacttggcgatctcatcaatacagacaaagcactatccgtcattatggcaatcttcgtttctgtcgctatcgctttcttcttcggtatgctggtacaatggctggcacgcgtggtgttcactttcaactacaagaagaaaatgaaatacagcatcgggatattcggaggtatcgccgttacgtccatcatctatttcatgctgataaaaggtttgaaggacagctcattcatgacccccgacaacaaacaatggatacaggacaacacagttatgctgatcggtttctgttttatatttttcacgatactcatgcaagtactgcactggctcaaaatcaatgtattcaaagtagtggttttgttgggtactttcgccctggctctcgcttttgctggcaatgaccttgtaaacttcataggtgtacctttagccggatattcttctttcatcgactttaccactaatggagcaggcagttcgccggacggtttcctgatgtcctcacttctcggtcccgccaaaacaccctggtattttctcttcggagcaggtatcatcatggtatacgctctctgcacttctaaaaaagcacataatgtaatcaagacttccgtcgaccttgcccgccaggatgaaggagaagagaacttcggaagcacgccgattgcccgcacactggtacgtttaagtatgacaatgtccaataatatttctaaagtgatgcccgaaggtatgaagagttggctcgacacccgcttccgcaaagacgaggccatccttgccgatggtgctgcattcgatctggttcgcgcttcagtaaacttggtattggcaggtctgctcattgcattgggtacttcattaaaattacctctttccaccacttatgtgactttcatggttgccatgggtacttccctcgccgaccgtgcctggggacgtgactctgccgtattccgtatcacaggtgtacttagtgtgattggtggctggtttattacagccggtgccgcatttaccatctgtttcttcgttgccatgataatccacttcggtggtacatttgccatcatcgcgctgattggcttggcaatattctcactgattcgtagccaggtgatgtacaagaaacgcaaagctaaagaaaaagggaatgaaaccatcaaacagctgatgcagagtagcaacaatgcagaaattctggaactgctgcgtaaacatacccgtgaagagttagtgaagatactggcatttaccgaagaaaacttagaacgtaccgtaacggcattcctgcacgaaaaccttcgcggattacgtcgttccatgggttctgtgaaatttgaaaaacaactcattaagcagatgaaacgtaccggcaccctcgccatgtgtcgcctggacaacaatacggtattggaaaaaggtctttactactatcaaggcaatgatttcgccagcgaactggtatacagcatcggacgtctctgtgaaccttgtctcgaacatatcgacaataacttcaagccattggatgccattcagaaaggtgagttctctgacgttacggaagatataatctacttattacaagtttgccgtcacaagatggaaaataacgattatgaaagctttgagaatgaactccgaaaagcgaatgatctgaacggacaattatcgcacctgaagcgtgaagagttacaacgcattcaaagtcaagccggcagcatcaaggtcagcatggtttatctgacaatgatacaggaagcccagaacgttgtcacttatacaatcaacctgatgaaagtcagtcgcaagttccaactgactgaataagatttcaccacagagtaaaagaggagtctcacagagtttaatttcaaattgattaaactctgtgagactcctcttttactctgtggtgagaaacaaaatttagtctctgcgtcccataaatatcataatgtagtaaatcagcgttgccaatgaacccaatgcagccaccacataggtataagcagcggaacgaagtgcatcttcggcttgcttatgattgtaagagttcgtaatgcccgaacggctcaaccataccaatgcacgcttacttgcgtctatttccaccggcaaagtgacgaaactgaacagtgtggtcatagcaaacaggataatacctgccagcaataactgcgggaacgtgttcaatagcaagataccacccagcaacaaccaagtcatccactgtgaagcaaacgataccaccggcaccaacttgctacgcatagtcagcggagcataagcccgtgcgtgttgcactgcatgcccacactcgtgagcggcaacggcagcagccatgatactgttactttcatatacaccttcactcaggtttactgtcttattggcagggttatagtggtctgtcagttgtcccggcgtatgtgtcacctgaacatcataaattccattgtcatgtagcatctgaagggcaacatcacggcccgtcattccattaccggtagggatcttggagtacttcttgaacttgttctgcaagttcatttgcaccagccagctgaccacagctataccaataaagataatccattgtattcctatcattccttccataatctttttctgtttttagtaattaaaaatgtgtcgtttgttatatataatacaaattgtttgccaaaaataaagggaaaccgtgagctttactacagtttcccttatattttaggaagaattagcgaaaacctactattgcccaacaagttgtaactctatcacgtaatccgtatctgcgggaacttccggtaattgcaacaccactccctgtccggtacgggtaattcgtattggggattgatctttaaacagaaaacccttcttcaccatttttccatccaatggaagataaagcgcattatccttcaaattcaagatgtgaacaaaaagtcggtttcctttttgtgttgtcactccccaatcatgtggaggaataataccgccacgagtgccataaatcgtttcgccatacactttcatccactctcccacttccttcagcctctgaattgccacttccggcagacatccgtccggctgagggccgatattcatcagtagatttgcatcctttccggcagccttcaccagataatgtatcaatgttttcgttgacttataatcttgatcagtaatcttatatccccacatcccgttcatggtttcacaagtttccagaggcaggtgactgacatcttgcccagatagtccggcactgttttcccccggcagatcacgctcgaagatttgtatatcttcccctgggaaaggtacctgatgatggttgttccctaccagacaagcaggttgcaggcggtgtatcagcgcatattgttccggcagctgccagtcaaaatccggattagcatcctggtcccaccagccatcgaaccagatagcacctatcggaccgtagttcgtcaacaactccgtcaactggttattcataaaagtataatagcttttccagtctcccttcggattaggccttccggttccacgccctgtacgtccccaaggtgcgtcttcacgataccagtcaatatgggagtaatagaaatgaagccgaataccttgtttatgacattcgtctgccaattcttttactacatcgcgcttgaaaggggttgcatctacaatattataatcggaatacttggtatggaacatagagaacccttcatggtggcgacttgtaaagcagatatatttggctcccgatgccttaatggcacttacccattcagccgcattaaacttggaaggatagaaacctccggcaagtttggcatattctttatagttcaaatctttattggtcatcgtccactcaccggtagccaacatacagtatagtccccagtgcaggaatattccaaacttattgtcttgaaactcctgacgggctttcaggttctcggcagacggttgataagtctgcgcctttgcaggcaaaaaggatgctgcaaacaaaagggataaaagaaggtgtgttttcatcataaagtatgcggatgggttaataaaaaatgagattacatcagcatgtatatctgatgtaatctcattataatatagttagacttactcttctgtataacgttcaatcgtctgtccacggtcaggacctacggaaacaatcttgatgggcacaccaagttgttcttccaggaatgtcaggtaagcattgaattcttctgggaattcatcttcgctctgcattctcgtcatgtcagtttcccaaccgggcaactcaacataaaccggctcaagaccttcactgatgtcatacgggaaataatcaatttcttcaccgtttactttataagctacacaagctttgattgtttcgaatgaatcgagtacatcgctcttcatcatgatcaatttggtaacaccgtctaccataatggcatacttcaacgccaccaagtcaatccaaccgcaacgacgtttacgacctgttaccgaaccaaactcatgtcccagtgtacaaatctggtcacctgtcttatcaaacagctccgtagggaacggacctgcacctacacgtgtacagtatgctttgaagataccatagacttcaccaatcttattaggagccacacccaaaccggtacatgcacctgcacaaatagtattggaagaagtaacaaacggatatgaaccaaagtcgatatccaacatcgtgccctgagcaccttcacaaagtactgacttattatcgttcagcaggttattaatctcatgctcgctgtctaccaacgggaattgcttcaggtactcaataccctccatccaggccttttcaatctctgtcaggtcatactcataattcaaacctttcagaatttgctcatgacgagctttggcttcagcatatttctgttcgaagttatgcagaatatcacctacacgcagaccgttacgactaatcttatcggtataagtcggaccgatacctttacccgtcgtgcctactttagcatcacctttcgcagcttcgtaagcggcgtccaatatgcggtgggtcggcaagatgagatgcgctttcttagaaatatgcaagcgcgctttcaggttatgaccggatgcttccaatgcttcagcctctgccttgaagagagccggatcaagcaccacgccattaccaatgatattcaccttgtcaccttggaaaattcccgagggaatagaacggagcacatacttctgcccttcgaactcgagtgtatgtccggcattcggtccgccttggaagcgagccacaacatcgtatctcggagttaatacgtcaacgactttgcctttgccttcgtcgccccattgtaatcctaatagaacatctactttcatttttctttcttatggttattatttttcttcttacgtttgttagcgcggtcgcacttactgcacaatccatacagataaagcgaataatgtgacagactgaaccgactcaacttagtattcccaatcgcctgctgtaactcttcgttctgaaattcagtcaccttgccacactgcgtgcagatttgatggtgatgcgtatcacggttatagctcttttcgtattgggaggaatttccgaactgatgtttgattaccagtcgtgcattgatgagaaggataatagtattgtaaagagtcgcgcggctcacacggaaattctcctggtcagccatcagcgaataaagcgtatcgatgtcaaaatgaccatcaatggaatagatagtatcgagtatggcatagcgttcgggagtcttgcgatgcccgttcgcgttgagatattcagtgaatatctgctttaccgtatctttcacattctgactttccattttggcggcgcagttttttacagccaacaaagttaagccttttttgcggaaagcaaatgagaaaggggaaaaaaaacaaaaaaagagtgatagagtaatcaccctatcactttattctatttcttctcttacaagattatatagcaactgttcggcttccgattcggaatgttccatctcttccacccgacggcacacttggaaagcatgttcttcactatgctgcatgaagcggcgaatggccgccatagctgcattgcgcacgtggtaggaaccggaaataaaagcgcaaaccgcctggtcgagaaattcgttcgcagtacgttcattcatatcccccttcttcatcagcaagcgggcaatggtgagaaaaccgcacgtctgtacatactcccgctcatcggcaatccattgaaaagacttcgcaggagcataaggaagatgctggaacagattcatagaagtaagttccgctatttcaatattctgaatattttccacccagatatcagcaatctccggaaagaagctgtctaccggctgcaacagccctgccaaaatcttacattcacgaatatcctctttccacaaagcttgcgccaatgagtgatctttttcgtacccttcggcaattgccttgatacggggaagttctacaccgaaattcaatttatagaccagccccttttcacgcatactttgagacacagccccgttcatagagaggcggagctgtgtttttatttctttcagttgttcatgtagatccacaaaacaatgatttatagttaattattaatagaaggcagattagaataatccttactgtaacgcaacatttgttccgcataaccttcgtcataagtcacctttacatcggttatcttaccggctgcatctaccactgcttcatatttcggatttacaaatcccttgtacggagccagattcagtttcttataacgttccagaacttcggcatgcaaagccggatccaccttcactgcatagttttctaccaaatcatgcgcactttgatagtcgcctgttgatttgatacgttggatctcggacagtaatttaccgaagagttcacgcagtttttcgtaatcgttcaccaccacataagtcttaccatctttcttcaccagttctactactttatccgccgcacctttctcaaacacccagcgggcaatgagctgacgattacgcatgtgggcttcttccacattattccccggttcaatgcgaaccaactgtgtcatcaggccgttcatcagataagtataatattctgctttgtaagcatcttcattgggtgtcagtcccaattctaccaacttaggatcagctacataatacagaccgaacaagtccgcacgcgcttcctcaatcgtggagccataggctttcaaagcatccggatcaactcccggaagcaactttccggaaccatgtcccagacattcatgcaagtccgtatggagttcgcctgtcagatcggcatatttatctatcaactgcaattcggcatcgctatatacaaactcttcattgaatccgttgccatgagccgccttattatatgcatccgtaatattaccgatagtcacagatttagaaccatgatggctacgtatccagttggagttaggtaaattgataccgatagccgttgccggataaaggtcaccggccagaatagcagcagtaatcaccttggcggaaacacctttcacttcatctttcttgaattgtttatctaccggagaatgatcttcaaaccattgcgcattgccactgataacctcagtacgatgcgtagcttccatatccttaaagtttaccaatgattcccagcttgccttcatacccaacggatcaccatagctttcagtaaatccattcacaaagtccacaagggaattcaaatctttcacccaaaggatagcatattcatcaaaagtcttcagatcaccggtctcataaaactttatcagttcggcaatcacagccttctgttccggattttcagctacgccttccgctttcttcagccagtatacaatcttatcgatagcctgtccgtacagaccacccactttccaaatcttttcctgaatcttgccgttctctttcaccaggcgactgttcagaccgtaagaaacaggcgtttcatctttcgggtctttcattacattatagaagtcttcagcttctttctgcgtcacaccgtcataatagttgcaagcagaagtcaacactaagtcctctcctgctgcctggttcacgcgtttcggcatcacagctggatcgaaaataaccggagacagctcatcgcataattgctccacggtttgtccttcagccagcggcaatgtagaggcatctacactcagcacagcctctttgaaaaattcgggagcaaaaccaggcacgaacttctcagaaccataatggtggtgaatgccattagagaaccacacacgtttaaggtacacttccatcgccttaaaatcaggtgtatttttgtcacctttatatcctgtataaacagcttccaacgttctccgaatgcgcaggttatattttccattctgatcgaagagaatgtcacggccctgcaaagcagcttccgtaaggtaatacaccagctctttctgttggagcgacaagttctcgaaaccgggaacccggtaacgtaatatttgtaagtctgcaaattgttccactgtataatcaaatttatctgcctcggcagttgttgtcttcgagccgctacaagttgtcagcaatgcaaaagcggcacatgctattagttgtttcttcatgtgtcgggagatatgtgagttggtatttagaaaagacgaaaaggaagtattccgaaacagttgctccggaatatttcctttttatacattgttctacgcagaattattgttttttatctgcgtgttttttgcgatatccgttaggagtttcacctacatttttgtaaaatgcagcgtagaaagactgacggttggcaaaacctaccatcgtgctaatttcctctacattcttgtcggcatatctcttgtccgtcaataaatgcttagcatcttttactctgtactcattcaataggcatgaatagttcataccaaaacgagaatttactacagcagacaaatagcgagtgttggttttcaactctttcgccaagtctttagccgagtaatcgggatctttgtacttcttctgcacaaccacgatattcaatatcttgtcatacaattcatctgccaattccggacgaatcaacgagcggtaagcagcattcttctcttttttctctctcaggttataggggcgcttctttgtagccgcttcctgattcttgttttctaaatcactcatttgaattaactggttagggtttgttaaaaaatgaaagcccgaaggattttcctttagactttacaaaagtctgacatttttttctaatacgcaacttttctcgtacatatttttgatctataaacaacgaaaaaggttgaaaagtagtctttaagccgatttaataagaaactttaacttttgcaaaagaggttatgatataaaatgaatacgtttatcagcttgttttatatacaataattaatgtacctttgcaggataaaactttatcaacgaaaatgatacagacgcttaaacgatattttggttacgatagtttccgccccttacaagaagagatcatccgcacattactggccggaaaagattccttggtattgatgcctaccggaggtggaaagtccatttgttaccagcttccggccctgttatgcgaaggaactgccgtcgtagtttcccctttaatttccctgatgaaagatcaggtggaatcactttgtgccaacggtgtagctgcgggtgctctgaacagcagtaacgacgagacggaaaatgccgctctacgccgttcttgcatggaaggaaagctgaaattactctacatttcgcctgagaaattaatagcagaagccaactatcttttaagagatatgcacatctcattatttgccatagatgaagcgcattgtatttcacaatggggacatgatttccgtccggaatatgcacaaatgggattcatacgcgagatgtttccaaatattccggtcatagctcttacagctacagcagataaaattacacgtgaagatattgtacggcagttacacctcaaccagccgaaggttttcatctcttctttcgaccgccccaacctgagtcttaccgtaaaacggggataccaacagaaagaaaagagtaaagccatactggatttcattaatcgccatcgcggtgaaagcggcatcatctattgcatgagtcgcagcaaaacggagacagtagcacagatgctgcaaaaacaagggctccgtgtagccgtttatcatgccggattatcctccgcccgaagggatgaagcacaggatgatttcatcaacgaccgtgtacaaatagtttgtgccacgattgctttcggtatgggaattgataaaagtaatgtgcgctgggtcatccattacaatctgcctaagagtatagagagtttttaccaggagatcgggcgtgccggacgagatggattgccaagtgatactctcttattttattctttggccgacctcattctattaaccaagtttgcgacggaaagcggtcaacaaggtatcaacctggagaagttacaacgtatgcaacaatatgctgaagctgatgtttgccggcgtcgcatcctgttgagttatttcggtgaagccactacagaggattgcgggaactgtgatgtctgcaagaatcccccccaacgttttgacggaactgtgattgtacaaaaagctctaagtgctatcgtccgtacggaacagcaaatcggcacgagtattcttgtagatatcttgcgcggaaataatactccggatgtatcggagaaaagctaccagcaactgaaaactttcggtgccggacgtgaagttcctgcccgtgactggcaggactacttgttacaaatgctacaactgggttattttgaaatagcatacaacgaaaacaaccatctgaaaataacaagtagcggtagtgatgttctcttcggacgggcgcaagcacggttggcagtaatccggcgtgaagagttcgcacccgccaaagggcgaaagaaaaaatcaaccattccggtcagagagctaccattggggttaccgaacacggaaagtgaagaacttttcgaagccctgcgtgcgttacggaaaaggctcgcagatcaagaagcactaccggcctatattgtactgtccgacaaggtattgcatttactcagcaccgcccgccctattacaatggaagcattcggaaatatcagcggaatcggtgaatataaaaagaagaaatacgggaaggattttgtcgagttaatcaagaaatacgtttaataacccgtttgcggaatttcttatggtataaataatatactaaagatgtaaaccacttatcatttgcattgctgtagcaatcccctgagatccgcctgcggcactccaagagacattgctttctcaaaatcctgctttgccaaatttttcttcttctgggacagataaatctgtccgcgcatcagataggcttccgtctgcgaaggattcaattttagagcttcttccagatcaatcattgccagatcaacatgctgcatatcctgttctatccccgcacgtgctacgtataaggctgcatcctgcggatcttctaccagcatcttattcaatatctccaaggctttctgtaagtttccatctttttgctccagagtggcgagtcctaaacgggcattataattctgaggatcgagcttcagtaatcgttcataatctgcccgggcaaatttgagatcgcgctgagtcacataaatataggcacgcatcaagagtgcttcccggttatccttttccagatccagcactaaagaatagtctacacgtgcttgctcattccgtcccatttcaagattcagtgcggcacgattcaagagaatgggaacagcccgtggagcaatgttcaaggcatacgtgtaagattctaaagcctgatcataatcccgttgccgacgttggatagtaccgagattagaaaacaataaggcattatgcggattagcaggttccagtttcaaagcctggcggatataattttccgcctgtgccagactatcttgttccgtacaagcaatggcacggtccgaaagttcctggtaagtttgggcaaacacaggagatacacctattatatatacaaggaaagaaagaatagacttcttcatttttaatttatttaaagattatgtttcaaggaagggaatcatttgtttcattacttgaaaccattagtttcattacttggaactattagtttcattgcttgaaactcctggtttcacaccgagaaactgcttgtttcatcgcttgaaactatttgttccacacgaggaaatattttgttccctaatatgcaacgaaacgtttaataaggatgactaatccaacggataagtttcaaatgcaaacagctctgtcgaaagataacgctctcccgtatcaggcagaagaactacaatcttcttatccgcaaaatccggacgttgtgccagcaagcgcgctgcatatacagccgcaccggaagatatgcccgccagtaatccttcggtagacgccaactcgcgtccgccacgaattgcttcatcatcgggcacaggaagcacttcatctacaacggaggcatcataaatagcaggaataaaattggctccgattccctgaatacgatgtggcccttccactccgccttccaatacaggagatgattctggttctacggcaacaatatacacatccggattatgttttttcaaggcacgtgccactccacagatggttccgcctgttcccactccggctacaaagacatccacttttccgtctgtatccgtccagatttcttcacctgtagtgagcgtatgaatctgtgcgttagaaggattttcaaattgttgaaggatgattgaaccaggaatagacgccctcaactcctgcgcttttgcaatggagcctgccataccggtcaatccatctgtcagtacaatttcagcacccagtgctttcagcagattacgacgctctatactcatggtttcgggcatcgtgagcatcaggtgatatcctttgattgtagcaaccatcgccagtcccacaccggtatttccactggtaggctctataatcgtcgcaccgggcttcagtgctccgcgcgcttctgcatcttcgatcatggcaagcgccacacgatctttcacactcccagccggattgaacgcttccaactttgcgataatattctgtttcagtccatatttacgactgtattccgctaattccataagcggagtgcgaccgataagttccgtcaggttctttgctatttttgccataacaatctaattattaaatatcctcacttgcaggtatctttgtacaaagataatgcaaaccaaaagcagaataaaatgaactcgttcattttttatgcagaggtacagcttatcttcgtttctaagcaaagatagataaaaaactatttcgctgctcaagtgttacatttctatcacgtaaatttgcataataaaatttatataactcttacaccttattaaatatatgtcacacgaacattcacatcagcatagccatgccatcaacgcagagtcgctgaacaaggcatttattataggcattgttctcaatttagcttttgtcgtcatagagtttgcagccggtttctggttcgattccctcgcgctgctttccgatgcaggacacaatttaagcgatgtagtcagtctcgtgctggcattgctggctttccgtctggccaaagtcaaagccaatgaacgatatacgtatggttataaaaaaagtacaatcctggtatccttgcttaatgcagtcattttgctggtagctgtaggcgccattgtcatcgaaagtattcataagctgaataatccggcagttgttcccggtggagctattgcttgggtagcgggtgtaggtgtacttatcaatgcattcacagctttcctctttatgaaagataaggaaaaagacctgaacgtaaaaggagcttatctgcatatggcggcagatgctttggtatcagtgggagtattagtggcaggtatcattatcagccggaccggctggtatattatcgacccgattatcggtctgattgtggctgttgtcattctcatctctacgtggaatttactgcatgacagtcttcgtctgacgctggatggcgtgcctacaagtatagacagtcaaaaagtagtagaagccatccgtgcccttcccggtgttgatgacgttcaccatatacatatatgggccatcagcaccacagagaatgcactgacagcccatattgttttaaagcaaccggaaagtatgcaagaggtgaaaccccttatccgccaccggcttgaagatttcggtatcggtcatgccaccctggagtttgaagttccgggcgaacattgcgaagccgtatttgccgaagattagctacgtttgatataatctaccacccatgctcctacttctttggtaccatatttcgcaccaccttccacctgaatttccggtgtacgaacgttagcatccaaagaagcatctacagctttgcgaatcaatgcgccttcttccagcaaattgaaatattcgaatagcatggcagccgaaaggatttgtgccaacggattagcgatgttcaaacctttagcttgtggccatgaaccgtggatcggttcgaatacaggagtgctttcgcctgtagaagccgaaggaagcaatcccatagaaccactgattacagaaccttcatccgtaaggatatcaccgaatgtattttcggtaaccattacatcaaagaatttaggctcctgaatcatcttcatggctgcattgtccacgaacatatagtccgtagtcacttcaggatattgcggtgccatttcctgggcaatctgtctccacaggcgtgaagatgcgagcacattggctttatctaccaccgtgaggtgcttattgcgtttcatggcatactcgaaaccaactttcagaatacgttcaatctccggacgagtgtacatattggtatcatacgctttgtcgttgtcctgatacttctcaccgaaatacataccgccggtcagttcgcggatacaaagaaaatctgcgccatccaccagttctgcacgaagcggtgatttatggagcagacatttgaaagtttgtaccggacggatattggcaaacaatcccagtttcttacgcatagccagcagaccctgttcgggacgtactttggcagtaggatcattgtcgaatttcgggtcgcctacagccgagaacaaaacagcatccgcgtttttacaaacttcataagtagcttcggggaacggatcgcccactttgtcgatagcatctgcaccgcagatggcatattcgtagtttactttatgtccgaacttctcacatacggcggtcattacgtccacacctacggtggaaatctccgggccaatgccgtcaccggctaatactgcaattttaaaatccattgttttctttattttttaggtattcttctattttctttccctcagcggggttcatcattctgattttttaagttcataatcatcctcaatgatattcagcatcttcattgtcgccttaatcgctgcctccgtctggtcggcatccagtccgcgtgtacggaacactgtgccgtcatagctccaggtaatcactgtctgcacaaaagcatcggtacgcccaccgggagggatggttacggcatagttcgtcagcatggggaatttgcgtcctaacgtcaccttataaatcttacgcagagcacgtacaaaagcatcatactgaccgtcaccgctggaactttcttcaaactcctgtccgttgatttcaattttcagcgtagccatcggcttcagaccgtaagcaaggttcacgatgtatgtcttcagtttcactttctcattcatcactccgtgcttcagtacatccgaaacgatataaggcaaatcttcctgggtaaccagttctttcttgtcacccaactcgataatccgttccgtcaccttacgcatggaatcctcatccagcgtcagtcccagatcttccagattcttacggatgttcgccttaccactgttcttacccagtgcatactcacgcttacgtccgaaacgctcgggtaacaggtcgttgcaataaaggttactcttattgtctccatctgcatgtactcccgctacctgcgtgaacacattttcacctacaatcggtttattggcgggtatggcaatacccgaataagattcaaccacccggctgacttcattcagacggccttcgtcaatgttagtgatagcattgaaatgatctttcagaatagcctgcacactagacaacggtgcattaccggcacgttcgcccagaccgttgatcgtggtatgaagtcccttcgcaccactcagcacggcagctagcacattgctcactgccaggtcatagtcattatgcggatggaaatcgaagtgagcatgcggatagcgcttcaccatcttccgcatatattcgatgacctgcaacggattcagcacacccagtgtatcaggcaacatataccgtttgatattcgtgtgcatcagtgcatccaccatctggaagacatactccggagaatctttcatcccgttgctccagtcttccaggtaaatattcacctccatatcctgctcattggcataattcactacgccaataatatcctcgatatgttcttcaggggtctttctcaactgacaggtgcaatgcttcagcgaacctttgcacagaagattaatgacgcggcagccggtagcgtgtatccagtctaccgacgtatgcccgtctacgaaacccaacacctccacccggggcaataaattacgccgcgccgcccagtcacatatcatcttgactgcgtcgaactcaccgtccgaaacccgtgccgaagccacttccaccctgtctactttcagttcttccagtagcagacgtgctatcatcagcttttcatgggggacgaacgacacaccactggtttgctcaccgtcgcggagcgtggtgtccatgatttctatttggggctgtttatacttcatttttattttcccacgcttctattttatctttattctctaccaggaaatcgatgtcatccaggccattcatcaggcaatgtttcttgtaggcattgatttcgaaagtctcacttttgcctgttgccttgttagtgattgtctgttccggcaggttcaccactacctccgttttcggatcggcggcaatggaatcaaacaattctttcaggaacggttcgctcactactacaggcaatacgaaattattcagttcattattcttgtggatatctgcaaagaaactgctgactaccacgcggaaaccataatctgcaatggcccatgctgcatgctcgcggctactgcccgaaccgaagttctttccggctacaagcacctgtccgctataggtcggatcgttcagaacgaaagagtcgattttgtttccttgtttgtcataccgccagtcgcggaacagattctcgccaaagccctctttagtcgtagctttcagaaaacgtgcaggaatgatctggtctgtatctacattctccaacgggagaggcacacaagtactggtgatgatattgaatttctgtttcattgtttcttatctttgattttgaaatacttattattaatgacttctgccaggaggactgaaattacatcagttctctcgggtccgtaatcactcccgttactgctgccgcagctgctaccagcggactggcaagcaatgtgcgtgaacccggtccctgacgaccttcaaagttacggttacttgtagaaaccgcatacattccggcaggcaccttatcatcattcattgccagacaagccgaacatcccggctggcggatagcaaaacctgcttcctccaataccttatccagaccttcttcacgaatctgtgcatctaccatccacgaaccgggtaccaaccaggcaaccacatgttccgccttcttatggcctttcactaacgaggcgaaagcacggaaatcttcaatacgtccattcgtacaagcacccaaaaacacataatctatctttttgcccaatactccctcaccgggttggaagcccatataatccattgatttcaggaatgaagctttagcagcctctcccattccatcagtcgtaggaatgtgctgcgtgatacccatacccatacccggatttgttccgtacgtaatcatcggttcgatatctgccgcatcaaaatgcacttctttatcaaacgtagcattctcatcgctcttcaacgtcttccaatatgccaacgccttctcccattcctcacccgccggagcatattcacggcctttgatatattcgaatgtcacttcatccggtgccaccataccaccacgtgcacccatttctatactcaggttgcacagcgtcaggcgtccttccatagtcagactgcgaactgcttctccggcatattccacaaaataaccggttgcaccgctcgttgtcattttagacatcatataaagagcaatatcttttgccgtcacacctttacccaattttccatccactgtgatacgcattgtcttggggcgtgtctgcaagatacattgtgaagccattaccatttcgacctcacttgtaccgataccaaaagccactgctcccatcgcaccgtgcgttgaagtatgcgagtcaccacacacaatcgtcattcccggcaatgtcaagcctctttccggacctaccacatggatgataccattcttcttatgcaacatgccgaaatgtgtcaatccaaaatcttccgcattcttggccagtgtatccacctgtgttttggagatcggatcttcaatcggcttgtcctgatcgtgggtcggcgtattatggtcgggcatacaaacaatcttttccggacggaaacattggataccgcgtgcacgcattcccgcaaaagcctgcggactggttacttcatgacaataaaggcgatctatatataactgtgtgggaccatcttccacttgctgaaccacgtgggcatcccagattttatcaaataatgtattcatcagatttattacgattttacaatttataattgaggttagtcttatgatttgaacttattgatacaatcgatataagcttctaccgatgcggcaataatatccgtattcgcaccgaaaccataatagatatgattgtcatattccacctgcatgtgtaccttacccatatcgtcactacccttgctgatagcctggatcgtaaattccttcagtgtcatatgacggtcaatgatcttcttcaaagcctttatcgctgcatctaccggaccgtttccactggcagccgcttcaaacttttcaccggagatattcagtcccagactggcaaccgaacgcacacctactccactggtcacttgcagatattccagtttcacgcggtggttctgtgtgcggtctgcaccggcaagcaccaggatatcatcatcattaatatctttcttcttatccgccaatttcaggaaagcttcatataccttgtccagttgttcctgttcaagctccacgcctaatacctgcaaacgattcttcaaagcagcacgtccgctacgggcagtcaatacgatagaattatcgtcgatacccacatcgtgcgggtcgataatttcgtaagtctgcacattcttcaacacaccatcctgatggatacccgatgagtgtgcaaatgcattgcgacctacgatagccttgttaggctgcaccggcatgttcatcaagcttgaaaccatgcggcttgtcggataaatcttctgtgtattgatgttcgtttcaatttcaatatctttatggcatttgataatcatagccacttcctcaagcgaagtattacctgcgcgttcaccgataccattgatagtaacctctacctgacgggcaccattcagtacaccggccatcgtatttgcagtagccattcccaggtcattatgacagtgtgtagagaggatcgctttttcaataccattcacatgctccatcaaatacttgatcttcgctccatattcatccggcagacagtaaccggtcgtatccgggatgttcaccactgtagcacccgctttaattacagcttccaccacacgagccagatattcattgtccgtacgacctgcatcttctgcatagaactctacatcatccacgtaacggcgggcatacttcacggcagctactgcacgctcgatgatttcctcacgattggaattgaatttatacttgatatgcgaatccgatgtaccgatacctgtatgaatacgtttgtgcttggcaaacttcagagcatccgcagctacatctatatctttttgtaccgcacgggttaatgcgcaaatagtaggccatgtcaccgctttggatatttcaataacagagttgaaatctcccggactggaaatcgggaatccggcttcaataacatccacgcccagcagttccaatgcctttgctacctgaatcttttccactgtgttcaattggcatcccggaacctgctcgccatcgcggagcgttgtgtcgaaaataaataacttgtcactcatttcttatagtttttataaattattgccattaaaaaaagcctttcacacttggaagtgagaaaggctttcgaatatcctaatcgttacatatattcacgcacagcactcacttccactaaaccttgccagtagaataataataccacacagtagaatatatgtaaagttctgtatcatttttatcttcttgtttttattatgacggtgcaaaggtatagataattccgtagcatacaaacaaattcgttacttttttctctaaaaaaacatcattttataagtttgctaccaaataactctataaagtataacaaaaagggacatacttgaacgtatgccccttttttatatgatcctatgtgataagaattacttcttgtcgcaagctttatcacattcttttttctctttgcagcaagcttttgtgctatcgcaagcagcagaatctgccttgcagcaagcttttgttgaatcacatgcctgtacttcttctacaacttcaacttcagtagcttctacttctgtattagctgcctttttgttaccacaagaagtcacggcgaaagaaaatgcaactgcaacagctgccaaaaataactttgtcttcatctctaattttgctttaaacattaataataaatagtgcggcgcaaatataagcaaaaaattagaattatacaaatacaaaaagcctccgtatcatttcgatatggaggcttctctctaaaaaacggcaactacctactctcccacttgacgcagtaccatcggcgtgatcaggcttaacttctctgttcggaatgggaagaggtggaaccctgatgctatagtcacctaaataagttagacatgatgcaaaaaagcaaagattttaaactgaacgtatatacctgccatacaaggcaaagaccaaaagtgaacgggcaattagtaatgctcggctatgatgttaccacctgtacacctgcatcctatcaacgttgtagtcttcaacgaccctaagaaatctaatcttgtggctggcttcgtacttagatgctttcagcacttatccaatcccgacttagatacccagcaatgcacctggcggcacaactggtaaaccagaggtcagtccaacacggtcctctcgtactagtgtcagagccacgcaaatttcatacgcccacgatagatagagaccgaactgtctcacgacgttctgaacccagctcgcgtgccactttaatgggcgaacagcccaacccttgggaccttctccagccccaggatgtgacgagccgacatcgaggtgccaaacccctccgtcgatatgagctcttgggagggatcagcctgttatccccggagtaccttttatcctttgagcgatgtcctttccatacagaaacaccggatcactatgctctagtttcctacctgatcgacttgtaagtctcccagtcaagcgcccttatgccattacactctgccgccggttaccaatcggcgtgagggcacctttagaagcctccgttacatttttggaggcgaccaccccagtcaaactacccaccaaacagtgtcctcgcactggcgagttagaactcaaataaccaaagggccgtatttcaacagcggctccacaaatactggcgtacctgcttcaaagcctccggcctatcctacacatcaattacccaaattcaatgttaagctatagtaaaggttcacggggtcttttcgtcccatcgcgggtaatcggcatcttcaccgatactacaatttcactgagctcacggttgagacagtgtccagatcattacaccattcgtgcaggtcggaacttacccgacaaggaatttcgctaccttaggaccgttatagttacggccgccgtttactggggcttcaattcaatgcttctcttgcgatgacatctcctcttaaccttccagcaccgggcaggtgtcaggctatatacttcatctttcaatttggcatagccctgtgtttttgttaaacagttgcctggaccgattctctgcgccccacctcgcagtggggaccctttatcccgaagttacagggtcaatttgcctagttccttaaccgtgaatcactcaagcgccttagtatattcaacccgactacgtgtgtccgtttacggtacgggtaccttaaagattaagtttagcggattttcttgggagtatgcttacatgcactattggattgttccgaagaacgctccatactatcaggttcgactctcggagcggatttgcctgccccgatcaacatctacacccttcaacgaactattccgtcagttcgcggcactgtcacgcctccgtctccacgtcactctttaaggtagtacaggaatattaacctgttctgccatcggcctcaccgttcggctgagccttaggacccgactaaccctgatccgattagcgttgatcaggaaaccttagtctttcggcgagggggtttctcaccccctttatcgttacttatacctacatttgcttttctacacgctccagcaaagcttacgcttcaccttcaacgctgagtagaatgctcccctaccgatgtttgcacatcccatagcttcggtaaattgcttatgcccgattattatccacgccaaactcctcgactagtgagctgttacgcactctttaaatgaatggctgcttccaagccaacatcctagctgtcttagcaatctgacttcgttagatcaacttagcaattatttcgggaccttagctgatggtccggattgttctcctttaggacatggaccttagcacccatgccctcactcctgatatagaactaatacgcattcggagtttgtcaagacttgataggcggcgaagccctcgcatcttatcagtcgctctacctcatattagtataaatcaaggctgcacctaaatgcatttcggggagtacgagctatctccaagtttgattagcctttcacccccaccctcagctcatccggaagcttttcaacgcttatcggttcggtcctccagacagtgttacctgtccttcaacctggccaagggtagatcacttggtttcgcgtctactccttccgactatccgccctattaagactcgctttcgcttcggctgcagatctcaagatccttaaccttgccggaaaaagtaactcgtaggttcattatgcaaaaggcacgccgtcacagtttaaactgctccgaccgcttgtaggcgcatggtttcagggactatttcactcttctgttcgaagtgcttttcacctttccttcacagtactggttcgctatcggtctctcgggagtatttagccttaccggatggtcccggcagattcacgcaagattcctcgtgtcccgcgctactcaggataccactagggttcaattagcttagtataccgggttatcaccgtctatgactgaactttccagatcattctactcactaactttcgtcccacaacgtggtcctacaaccccatacatgccgtaacacatatggtttgggctattccccgttcgctcgccactacttggggaatcattatttattttctattcctacaggtactaagatgtttcagttccctgcgttcgcctccatcgtaagatggataatatctcttcaagatattgggttgtcccattcggaaatccgcggatcaaaggtcatttgcacctacccgcagcttatcgcagcttatcacgtccttcatcgcctccgagagccaaggcatccgccatgcgcccttacttacttttagtcttacctagccgtatggctcgatatatactttcagcttgttataactttactttttttgtacatcatgtcaaagaacggttggcaagcaaattaataattaataattaaaaattaaatcgtcaccagagtggagaataacggattcgaaccgttgaccccctgcgtgcaaagcaggtgctctagccagctgagctaatcccccttcattaattaaaaattataaattataaattaaaatgcgatgtcgtaaatttaatttttaatttctaatttctaatttaagaagtagtcccaggcagagttgaactgccgacctctacattatcagtgtagcgctctaaccaactgagctataggactgtcgagttcaacctcgccttgcggctcggcttcttctttctcaatatatattatataaacaactacgcgtagtgcaagaggttcttatgtagcatgtcaaaagaaccaacttttaatttgttagtacagagagtttttaatttataattgttaattattaatttcaaaatctctgattttgactgagcgtcgctccagaaaggaggtgttccagccgcaccttccggtacggctaccttgttacgacttagccccaattaccagttttaccctaggccgctccttgcggttacggacttcaggtacccccggctttcatggcttgacgggcggtgtgtacaaggcccgggaacgtattcaccgcgccgtggctgatgcgcgattactagcgaatccagcttcatggagtcgggttgcagactccaatccgaactgagagaggcttttgggattagcatcacatcgctgtgtagctgccttctgtaccccccattgtaacacgtgtgtagccccggacgtaagggccgtgctgatttgacgtcatccccaccttcctcacatcttacgacggcagtctctctagagtcctcagcatgacctgttagtaactaaagataagggttgcgctcgttatggcacttaagccgacacctcacggcacgagctgacgacaaccatgcagcaccttcacaaatgccttgcggctataatgtttccactatattcatttgcaatttaagcccgggtaaggttcctcgcgtatcatcgaattaaaccacatgttcctccgcttgtgcgggcccccgtcaattcctttgagtttcaccgttgccggcgtactccccaggtggaatacttaatgctttcgcttggccgcttgctgtatatcgcaaacagcgagtattcatcgtttactgtgtggactaccagggtatctaatcctgtttgatacccacactttcgagcatcagcgtcagttacagtccagtaagctgccttcgcaatcggagttcttcgtgatatctaagcatttcaccgctacaccacgaattccgcctacctctactgcactcaagacgaccagtatcaactgcaattttacggttgagccgcaaactttcacagctgacttaatagtccgcctacgctccctttaaacccaataaatccggataacgctcggatcctccgtattaccgcggctgctggcacggagttagccgatccttattcgtatggtacatacaaaaagccacacgtggctcactttattcccatataaaagaagtttacaacccatagggcagtcatccttcacgctacttggctggttcagactctcgtccattgaccaatattcctcactgctgcctcccgtaggagtttggaccgtgtctcagttccaatgtgggggaccttcctctcagaacccctatccatcgatgtcttggtgggccgttaccccgccaacaaactaatggaacgcatccccatcggttatcgaaattctttaataacaaaaagatgccttctcgttatactatccggtattaatctttctttcgaaaggctatcccggaataaccggtaggttggatacgtgttactcacccgtgcgccggtcgccatcaacctattgctaggtcatgctgcccctcgacttgcatgtgttaagcctgtagctagcgttcatcctgagccaggatcaaactcttcattgtaaaagtattgtgactgcgcaaattaataattaaaaaattaaaaattaaaacgcgacagtgttttggctctgttcaggacgctcggtttattaaaagtcttcaaattacctatatatataagttacttgacggttctttttttttatacccagatgctgcgcttttattattaatttttaatcattaatttgcgaagcacctgctcttgtactacttgtattgtttatgtaaattcttcaaagatcgcttctttttaaaactgcttttcttttcagaaagcggatgcaaaggtaagaacttttaagtatatcttccaaataatttcgaaagttttttttcttttttctttttctcgtcgtctctctttgcgaaagggagataaaagaagaagaagttcttagcgccgcctctatcagggaagctgactcagcgtcagcctcttctcggaaagcgggtgcaaaggtaagaacttttaagcatatcttccaaatgtttccggaagttttttttctttttttcttttagaacgctgtattcctgatcggaataaaggctaaagaaaagaaaaacgttggagttcctacgccgtttctgtcagaatgtcaatttcaaggctgaccgtctcttggttagcgggtgcaaaagtagccgatatatccattcgctccaaacatatctgtctttttttcgaaacttttttgaaacaatttcgtaaatggctgattgataaggatgttgtagaacataagtttgaaaggaagtatgaaaggagctggaagggggtacattattatatatgcgtgcgcgtgtagggaagtagattaactcacctaccacctcccccctacggggtactcctactcccaggaggaggagaaagggccaccgattcgcattattaaaagtattataggtaagctggattcgaaggaggaggttcttgcagaattgtagcagcatcaaagcagggacattcttcgatccattcttcaggttcgatctcaccgttatggttcagatccggactcagatcacggtgtcccactaccctactgcctggatattctttcagcaaaagcattaccaggacacgcagggaatgtttctaaaaggtagttcgagtatcacaggaatgaccatttgtgtccaacccgccttcataacaaacaccaatcgagtgagcattgtagccacgggcatgcgcaccggatttatcaacgggacggaggctcttgatgcttccgtccttacgtatataatagtgatagcctgcaccggagcccccccggcgcaggtgatctgtgatcaagtcatattccgtatagcaacggtcagtgcgggtggcgctgcaatgaaggacgattagatcaatctttctcataagatattaaataaaggtcacgttaaatacacttcatcgccgtcatggcatggcactcaaggcacccagaacggcagaggcaatagcgatgacaatcttcaatacagtatccaaagataattttttcatgattattatagtttaggttagttattaatgcgaatcagctatcccagaggattttcattcaggtcaccgtcaccaccagagttgccgccggaattacctccatccgatgatctgccttccttatcttccaatttctctaaggcaaaggttacatttgccggacttcgcgtagcagcatggctattgtttaccagtttcagctccttatccggtacaaaacggatattcacccgcttgatattcttcaccgtacactctgccgaagtagctactcccggacaacagaatgtcatgtaaaacgtaccaaactgatccagtttcaccttgtttccgttagccagattttcctgaacctcctctacaagcgcttcaatcacatgtttcacatctcccttcgtcatcgcacagcttttctgtatgtcggttaaactgttttgcttcataattaatagtattaaaagaaaaaagcaccacacgaacaacgtcgtgtagtgctatgtttaaaatgacagactctatctgtctatgatcttaatctttttatattagaatgtcatttcacaatccatcgttctatatttctggtacgattactgaaatttacaccgatcttaaacaattgacggaaatcagactcaaaaggaagagcgtaatgcttttcttcaatctgccgcaaagcctcctcagcagtaccttcaagcttgaattccattacataaacgtacttttcagtctttaaaatcagatcaatacgcccttcggatgtgtgatactcagcttccgtatagaaacctaccaacttgaaaatgataaacaggacgttttgataatagagctccaaatcactaatcagttcataaggagtatcggcaaagaaactttgcaagcgacggaagaaagcatcaggctgcccactctctatctcacgaacaaatttctgtatctcaaacggagcttccgctttgtttacccgggtataaaatggcattaaaaatctaataaatccttcttcaacttctctgttcgggaagcctaaactatagatgccaaagcgagaattatatcctttgatagtcaaatatccactctgataaatcacaggtatgggactatcgtcatcatagatgctattaagtacatccacactggtttcttcgtgagccattcgttccagatcataattattatgtttcaacagttctacgagataagtaggcgtacccgtctcaaaccaataattaccgaacttcattttataaaaggtgttcaacacactgaaaggattgtaaatgccttcagaatcttctacaaaatgataaccgtcataacaatctttcaattcggcacaaacccgctcgtaagtcatcttctgcatagctgccagttcgtacaggtcttcttccagattatcatgtatttctttctccgtcattccacaaatggagacgaacggctcatacatagaaatatcattcaaattattcaagtcactaaaaacactgactttaccgaatttagttactccggtcaataaggcgaaccggatatatctatccattgttttgagcacactataaaaagatttcaaggtgctacgaaactcgacctgtagttttctttctccaatagcctgcaacataggtttgtcatattcgtcaacaagaataacaacaccttctccggttttcttataagcacgttccaccacaccggcaaagcgcaaggcgagagtaacttcacctacaccggtaccatatatagcttcccactctagcaatgccttattcagaatatcgtcaagactgtgaggtgtatcatatttcccaatgttgaggtccaaatgcaaaacaggatgttttttccactctttctccaactgctccaaatcaagtccttcaaaaagttcgcgtacccccgagaaataagcctccaaagtagatataagcaaactcttgccaaaacgacgcggacgactcagaaaataatagctgccagtcttcaccaacctgtagataagcgctgtcttatcaatataaaagtatccgtttctacgaatcttttcaaagctctgtatgccaatcggatatattttattactcatggttcgttctccttctcacattaaacgacacaaagataataatgttttgtgatgaacagtgtgacaaaatgaaaaaccttgcgacagatagagcaaatatcaattcaattatttatctttgttagcttttataagttagcatacaaaaaacaataactacaatgaaagaattttttaaatttacgctggccaccatcacaggtattatcgtgtcaagcgtcgtgttgtttttcgtcagcatcctgatactgtttagtatgctgtcctcgtcagagtctgaaactcaggtacgcaaaaactctgtgatgatgctcgacatgagaggtatgctctcagaacggagccaggacaaccctttcgacatcttcctgagcgaagatgaaactacgtacggactggatgacattctttcgtctatccagaaagccaaggaaaatgaaaacatcaagggaatttacttgcaagccggttcaatgggcataggatttgcctctttggaagaaatacgcaaagcgctggctgacttcaaaaccagcggtaaattcgtggtagcttacggtgaccaatactcacaacgcctgtattatctggcaagtgtagcggataaagtgttgctgaatcctcaaggcgcaatcggctggtacggtttggcttctaccccgaccttctacaaagatttattgtcaaagattggcgttgaaatgcaggtattcaaagtaggtacttacaaatcagctgtggaaccattcatttctacagaaatgagtccggccaatcgtgaacaggtaaccgtattcctggatggtatctggggacaaatgctgagtgatatttcagaatcaagaggcgtaagcaaagaaaaactgaacgaggctgccgacaaaatgctgatgttctatcccgccaatgactgcgtggaatatggcctggcagatactctggtatacaaaaatgacgtacgtaactacctgaaaacaatggtgggaatagacaaggatgacagtatgccaatattaagcttaaaagacatggtgaacgtgaagaagaacgttccgaaagataagagcggaaatattgtcgctgtgtactacgcatatggagccattgacagcggaagttcgtatgcaggtagtgaagatggaattaattctgataaggtaatccgcgacttgcgcaaactgaaagatgataaggacgtgaaagctgtagtgctgcgtgtgaattctccgggcggtagcgctttcggttcggaacaaatatggtacgctgtcaccgaactgaaaaaagaaaaaccggtgattgtttccatgggtgactatgcagcatctggcggttactatatctcttgcaacgcggacagtattgtagctgatccgactacactgacaggatctatcggtatcttcggaatgttccccaacgtgaaaggattgacggataaaatcggtctgtcattcgatgtagtaaagaccaatacatacgctgacttcggagcaatgggacgtccgctgaatgacggcgagaaggcattgatgcaaaatatggtgaatgagggctatgaactgttcgtgaaacgttgtgcagaaggccgggacatgaccacggatgaaatcaagaagattgccgaagggcgtgtatggacaggcaccaaagccaaagaactgggcttggtagacgaactgggtggactggacaaggctttggaaatagctatcgaaaaggccggactggatgcctacacagtaatgtcttatccgggcaagaaaagtttcttcgatatgctgacggatacgaaacccggtggatatatccaatctcggatactgaaaggcaaagtcggtgagctttacaaccaattcgactggctgaataattttgagaactgcgataaaattcaggcacgcgttccgttcgagttgaacatcaattaaagaaaggagtggatggaagaaccgctggttaagatacactattggctataccccatctcgtggatttacgggatgggggtacgcctaagaaataaactctttgattggggatattaccggtcaaagagttttgacgtacctgtggtatgcgtcggcaacctcgctgtaggcgggacaggcaagacaccacacacggagtatcttatcaagctgttacaacaaacgggaacaaacgttgccatgctgagccgcggatataaacgaaaaagcaaggggtatgtacttgctacggaagaaacggatgtaaagcgcattggtgacgaaccctatcagataaaaaccaaattcccggctatccgggtagctgtagatgagaaccgctgtcacggcattgaacaactgatgaaattggaccaccccaaagtagatgtagtgttactagatgacgcttaccaacaccggtacgtgaaagccgggctgaacattctactaacagatttccacaggcttttttcagacgataccctacttccggcaggacgattacgcgaacctgaaagtggcaaaaacagggcgcacatcgtgatcgtgacaaaatgcccggaagatatcaaacctatagatttcaatatcatcacgaaaagactaaagctgtatccgtatcagcaactttatttttcctcgttccgatatggagcattaacaccgctcttcggagaaaaacgccgaaccctcgcatcactggaaaaagacgaacaagtattactggtaacaggaatcgcttcgcctgtaccgctggtggaaaagctaaaagtgcacacaccgcacgtaaacttatgtcagtttgacgaccatcatgatttcagcagcaaggatttgcaagctataaaagaacgcttcgaacgtctcgaaggaaagaagaagctgattatcaccacggaaaaggatgcgacaaggttgcaacaccatccggcactcgccgaaacgttaaagccgtatttgtacattttaccgattgagatagaatttttacaaaatcaacaacatatatttaaccaaaatattattggctatgttagagctcattcaagaaacagcagcttacctgaaaggtaggatgcacacacaacctgagacagcaattatcctcggaaccggtttaggcagtcttgccaccgaaatcaccgagaagtacgaaataaaatatgaggaaattccgaacttccccgtatcgacggtagaaggacatagcggaaaactgatattcggaaaattgggaaacaaggatatcatggcaatgcagggacgtttccattattatgaaggttactcaatgaaggaggtaacgtttccggtacgtgtaatgcgcgaactgggtatcaaaaccctatttgtttcgaatgccagcggtggtacaaatccggattttgaaatcggcgacctgatgattattacagatcacatcaattacttcccggagcacccgttgcgtggcaagaatattccatatggcccgcgtttcccggatatgagtgaagcgtacgataaagagttaattcgtaaggctaatgcaattgcagcggaaaagggtatcaaagtacagcatggtgtatatatcggtacgcaaggtccgacatttgagacaccgtccgaatataaattattccatatcctcggtgccgatgcagtgggtatgtctacagtgccggaagtgattgttgccaatcattgcggtatcaaggtattcggtatttcggtaattaccgaccttggtgtggaaggtaagatcgtagaggtgacacacgaggaagtgcagaaagctgctgatgccgcccagccgaagatgacagaaattatgagagaattgataaacagagcataatcatgagaacagaaatatcaagcctcggtgagttcggcctcatccgccgccttaccgacggtattgaactgaagaatgaatccagccggtacggtataggtgatgatgctgccgtactctcctatcctaccgaaaaacaagtcttgattaccactgacttgctaatggaaggtgtgcatttcgatttgatttatgtcccgctgaagcacttaggctataaagcggctgtcgtgaacttctccgatatctacgccatgaatggtacgcccaaacagatcaccgtttctctggctctttccaagcgtttctccgtggaagatatggaagagttgtatgcgggcatccgtctggcgtgcgaggaatatgatgtggatatcataggaggcgacacctcttcttctcttacgggactggcaatcagtatcacttgtataggtgaggcagacaaagataaggttgtctaccgaaatggtgcgaaagaaacagatttgatttgcgtaaccggtgatctgggtgccgcatatatgggcttacaattattggaacgcgagaaagtggctttgaaaggtaaggctgatatgcaacctgatttctccggaaaggaatatctgctggaacgtcaattaaaaccggaagctcgccgcgacatcattgagaaactggcggaagaaggtattcaacccacttctatgatggatatttcagatggtctatcttctgaattgttgcatatctgcacgcaaagtaaagtaggctgccgcatttatgaggaacatatccccattgactatcagactgccgtcatggctgaagagttcaatatgaatctgacaacatgcgctcttaatggtggcgaagactacgaactgcttttcaccgttcccattgccgatcacgagaagatttctgaaatggaaggtgtgaagttaataggacacatcactaaaccggaattaggttgtgcactgatcactcgcgatggtcaagagtttgaactgaaagcacaaggatggaatccactgaaagaggaaactaccgagagtgaaggcgaaaaagctggcgaataaagatttgtaagagcagataaacagctgaattcatttttttcttaaaacataagcgctgatacttagccacataggcaaatatcagcgttttttatctccaaagcgcttgcatagtccaaaagtttcactacctttgcaaccgcaaaagagaaacaatggtgccatagctcagttggtagagcaaaggactgaaaatccttgtgtccccggttcgattcctggtggcaccaccaaagaaagtacataaatgcttttcacacatgaaaacccttgaattagagatagttcaagggttctttttttaccctcactacgcattccgctacatatttgtgaagttggatttcgccaattcagtggctttttttaaggcttttgaaaaagccataaatacgcaccatacttcattgtttttcagctgtttgacaattccaatctccggtgtgaaaaagtaattttgcacacatgaccggatgaagtcgaaaaagtgaaagaaatttaaaaattcggtatttcccatcgggataaaaaaaaggaatcgaacccgggatacaaaaggcaattcgaacctgagaaaaatgggatttttatggcttttccacaagtccctcaaaaaaaccaccgaatttaacatttcgctccacgtcctcatgccatccggttttgacgaaacaattgaatgtaacacctcaaaaaacaaaagtgatgaaacaaggaacaatgaacattctgtttttcgtgcttaaaacgaaattgttgaaaaacggtgaggcaccggtattgatgcggataaccatcaatggagactatgacgatgtacgtatccaaagaagcgtacccctgaacttatggaacgccgccaaaggatgcagtaaaggcagggacagggcatcagtggcactgaacgcctatattgccgaactgcacgcacgcgccttggaaaaacacaaggaactggtattggaacaggccctgattaccccaaaactgattcttaaacgtgttttcgggaaagacaccgaaatgcgtacactgctcggcaccatgagggaaggcatcaaggaaatggaaatactggcgggtatagactactctcccgtcacgatcaaccggtataagaacgtggtgaagaaattacagctgctcatcccctcttattacggaaaggaggatgtcactttccatgagctgacaccggagttcatccgtgcgtttgacatctacctgaaaacggaggcgggactgtgccggaacacgatagtccgttatatgaaatgcttcaagaaatttaccaatatggcattggcaaaggaatggatgcgcaagaatcccttttacggttacaagatggagcaggacgagaccgatccggtattcctgacctatgacgagttgcagaccgtaatgaaaaagaaattcaccattccacggcttgaactggtcagggatgtctttgtcttcgcgtgtttcaccggtctggcattctccgatgttgccagtctgaacaaagagaatctggtacaggacaatctcggagactggtggataagaaaaggaagggtcaaattggaacaccgtaggaaggcttcttccatcagcaatattccattgctgcccgtacccctggccatattggagaaatacaaggaacatccgacctgcattaagaaaggatgctgtttgcccgtcatgtgcaaccagaagatgaacagctatctcaaggaaatagccgatttctgcggcattaagaagaatctgaccacgcacgttgcccgtcacactttcgggactacggtcacgcttgccaacaatgtgcctcttcaagatgtttccgtcatgctcggccatgcctccacacgtatgacacagcattatgcacgggtcatgaacagcagcctgaaagaagcaatgaacaacgtgaaggagcgtcttgcacaataagtatacaaattcagtcattaagccgtccccctagggatggctttttttgtaatctataattcacaatatcctgccgtcctttcaatttcttacctgcaaatatagccatttgtcgggttgattgcgcaaggcggcccctttcaggggctggttggctaaaagaaaatcatcctcgcttcgctgcggtattttcttttgccaagccttgctcaatccccgacaaaagacagccaggcaagtaagaaaacgaaaatccggctccatggagccgatcatgtcaaacttaaaaaaataaaggtatgaacagaaagacgacaagcaaaggacagcaggaagccaatccggaaatgacgatgttggtttatcgggaaatgagctatcctgcacgggaagtgcaaggcaaagatgggaactatctggtttccgtagaaagactggaacaggaactgctggatggcatcagaagccttgatccgacagcattcgatttggacgaagaaatcgcttactattgttcggacgaagagatccgcctgttgacggacgatgaactggaagaaatgatttacggctgacatttaaaaaagtaatgattatgaatgaaacaacagcaaaggtctgcgaagagcaagtagcagaccttaccatagagaatgcacacagggtcacgatgatccggaaaaaaggtacggactatccccccgtaccgttccatttcagaaaggagcatcatggaacgggcaactatgtacacctgtacggaaatccggaagatcacaatgaattgcattccaaggacttcaaagactgggaagccgtagcattcaaacatcctgcctatttggatgatatgtggaaacaggcttgcgacgcatacgcctggagttccttcaatccggagattcgcggcgagacggacatcatgatttacggagaggggctgcacaacgacctgcaactcatgccggaagaggaacgggatacatacatcgccgcctaccggcagaagttgtccgcccagctctcggtcctctcccgctgtgccaacccgatggtgacgggacggagcggatttgattactacaggcaggaaaaaacgaacagaagctatcagaaccgttacgaagaattccgcaattggcggaaaaaagttcttgaaaccgtcagacggaaaaaggaagccgcacgaccggaggaagagaaacaggaaaaggcatggcagacgctcaaacgcgacatcaagagcagtgccgataccatccacgggattgataccggacaatgccggggctatagccgtgccctgtttgtcagcagcatcctgaacaaggtatccactttggccaatcacggggaagtggaaatcgtccgtagggccgtggacttcatttccgaatataacgcaagggtgaagaaacccgtcatcacaccgagaaacaaattcttccaattgccggaactggcggaacggatgcgcgaaaagctgaaagcgatgcaaagccgggaaaacaaggaagtgccgttcgagggcgggacacttgtatggaactatggggaagaccgccttcagatcctgtttgacaggattcctgaagacagcagacgaaaggaactgaaatcctccggattccgctggtcacccaaaaacaaggcatggcaacggcagctcacctccaatgccctcagtgccgccaaaagagtgttgaaccttcaaaacatctgaaccatgaataacgacaaactgaaattcgtagtcgattcacgcagttttgacggcagctgcgtgaccaccatgtctgacggaatacacggcgactaccaccatgagacactggaggaactgagagacagggaaaagaacccgtgtctcacagccgtgtccggaaataccgtccgcaaaatgatacgcatccacctgcaatccctctgcgccccgttcagtgagattacggaagaaagatatttcgactacatggatgtcttgccccccatccgccatacccggaatttctttttcctgggagagccttatcatgcggacatctaccggttctgtttccgggcgggcggacgctacttcacgggactccgctccgttaccacgccaaggaaggagctggaacggcagatggacaaccattaccggaacattaccttcaaaggagacatccagaaagaaaagccgatggtcatctccggccacgcacggcatgcctctataattatagttccttatctgtttcttgacataaatggcgagaaaaagttcatctgcaacctgatgagaggaacggacgaatcgtcaggcagggatgtgaggctggaaaccgccaaaatcctgcgaagcctgcgccgtcatcatttcctctacttctccggctatgagggaaacgacgatatggacaggttcctaggcgaagtgatgaagaaaaagcacaccctgctggcaaacggcaacttcttccaatatcccgtgaaccgggagtccgtgtcgtttaccggaacggtcagggaaacaggcgagccgttcttcttccggatttacgacagggagctgttcctacacctgttgtacgtcctgagaggcatcaaaagggaaaaagctaaaatataacgtgacacataacgacggtatggtgactgtctttccgatccgtcaccatactaaaaaaacaatgagatcatgagaactgtgaccgaagaatcgttgcgacgcaggttggcccgtctggagtcggccttggaaagcgaaaaggcacgcctgagaaaagtatgcggcggcatcccctggggagccgggatgaggcgtaccaaatgtaccccctcattccgaagggaggacgaactgatcgggaaaatcaaggcggtgagacagcaactctcccaaatgtccgcaggcggtgacaatcacacgtttaaagaaacaagcaggtgaattccgaccaattaacttgcaagtcaataattttaaaaccagttacgaatatgaacacccgattggctataatccgttcagagggaaaagaacatctctgttaccgggaagaggaatgttttgtcgatgtatcctatccgatggtgacatttaccaaaggggaggatgattttgaaattatcaaatgcgaccatccgtccatggaagagactttcctgtatcaggaaagccgtctctcaatcgtgattgaaatataccataacggctggccggcattgtctctgaaagatcccgtgacccatgagatatacacggtcctgacggttaacctggaagataaggcggcattctcactgcctgacagggcattcgtggacatcaacaacaatcctgatgccatggagttccttctgtccaacaaattggctgaggatacaggctataaacgtcagagcggctgggtaagctacccgatggtcacacttaaccttccgacgttttacaggcttgacccacatgtctttagcgcaatattgaatatccggtaatccttccgggcaatgaatctggtatcaacaatcaaatggaaagaatcatgaaaagatatgacataagagtaaggtattccttcgagggcacttacacggtagcggcagaagaccgcgatgaagcaaaaagaatggtaaatgacgattgcggtcttgttttgggcggcgatatccacacgacacgcgatgacgatgaagtgttggagtgggatttctgtatccatcccgacacgcggattctctccttgcaggaaagaggcggaaaaggaagtttaccgtcagaagccgttgatttcagcggcaggatcaaggaactgcggggggacatcatcgacgcgatacggcagttgctccatgctcactgcatgaaagaaattcgtcttccggaagaggattatgatccggtctgggtgatatggtttggcaagaacggagaaccatatgaatgcagggtgacaggactccgggtaacggcggacagcctgaccgtccttgccgaagagaaagaaagcggtgacgaggtgcagtgtcacagcccgtttgaactcggcgcaaagaacatagactggcttcatgagatgtatgaggctgtgtggcatcaactgagagaaacaaacaatgtagaatcacaaatagaagaaccatgaaatatcaagcggaaaataccgtctccagtttcttctactacatgtggaacgcctggagcgaggaggaatgcaaagccgtgtatggcggcatgtacccgcatttctgggaaaaatggtgcgtggcgacagacaagggcacattcggcgcggcggaacggttctacctggaactctcggaagacaaccgcaggattctggtggaacgggccgtctcgatatatgacggacgaggcctcagaaacaggaacagaaacataaaaaatcaaacagcatgcagggaaacattatcagtctgatctgcaactcatgcggttgcggtcaaacggaagcacaggaatacctggactccgaaatacggtacctgcgcgaattgcaggaggcggacgacctgagagaagatgacatggaaacggcctgtctcaacctcggttttgagcttgactaccgggaatattttatcaaccgcctcgcaggggcataaaaaacttatggctatgacttattttcagaacatacactctctggcggacttgaagaaagaataccgccggctggcattggagcaccacccggacaagggtggtgacaccgcaatcatgcaacaggtgaccaccgagtttggaaggctttttgaggcttggaaagaaaaaccggatattccctcgacctcaaccggatatgaatatgactatccgggagccacggcaaaggaatacaccgggtatgtgtataacgaataccgctggaaaggccgcaattacaaggggcagcacgctccggaaatcgtgggactggtacgggcatggctcaaggagacctatccgggatacaagttctctgccagacgggagaattaccactccatccatatccggttgatgaaagcggatttcgaggcgttcaccaaagagtccggaaaagttcaaggcgatgtcaaccaccatcatatccattcagacaaatcattgacggacagggcaaaggatgtaatgatgaatatctgcgatttcgtcatgtcgtacaatttcgatgacagcgcccccatgacggactattttcataccaacttttacctgacgctcggaatcggaagttacaaacagccgtacaaggtggaaccgcccaaactcggcagcaaagacaagccggaggtattcaagcatccggaaggtccggcacacaaggcaatgcgccaggcattgggcaaagcgcgtttcggcatcatcgaaagccggaagtatgccggggaaataattctgggggaagactgtttcggctcacggggcgaagtctatttttggccgaaggaatattcaagcgcaaaaatggcccaaaaacgcatcgacaaactggaggaagccggaataaagtgcgaacccaccggctataacggaggatacatccgcctgctcgggtacacccctgaaatgagaaattccctggaacgggaacgtcaggagtatgccgccgcgtatcaggcatggtactcaaaacagaatttgaaaacaatctgattcagaaattatggatacaaacaatttggacaagtggtggtacggacttccgggaaacaccagacaggctataggaaacgatggaatatgggaaaaactggatatgccgtcccgttcggcgctacaccgatattcccggcttagaatttacggaacggcaaagaacagggatgaggaacgcacgctgctcaatgaaatcgcgtgcggactgggcgaccttgcccttgtccgtaaaaacggcatcgcgttggaggaaatgtgcaacgggaacggggaattttacgatgaataccaggaacagttcaacatattatatgacaattacggacacacaatagaaaatataagctggccggactggatcggacatacaattccgacaaacagggaactgggccgattattggaacatcacggttacaagcgtatggaaatcgataccgacagaagaatcccgaaaactttctatgttttccgtcgtgggttgcacatcaacgcaagcgaggacttgtcttaccacatcgtaccacaacaggacagtttcggactggggcgttttgctgtatgtgctaccaaagacggtgaaagcttccagctgggaactgactgtgcccggctctttttgaggcgcttccttgccttcctgaagggtgaaagaagcgggaaagagattatagatgaaatatgcaacaaccgacaaactgaacgatagtatgaaagcaaaagtattcaagtacaagtctgatgggaataccgtcgtggctccttatatggaactggagccgtacgcggagaatgtatatctctccctgtcgagaaagaacgaatacgggaatgaagacgatgactgtttccatgtggtctgccggattgaaaacgtttatttctctagcgggcagtattcacgccggttcctcaagggagaaggttgcagagaggaagccgccacctattgcaggaactggattgcggatacgcttcaaagtgcggaaagaggagccttcgtcaatttgatctccgtccgcgtgttcgaagctctcggacttgacaccacccccttggtgcaagcccgtgaggaatataaaagaatacaggagcagaaacgcagggagcagaaggagaaagaggcggaagagcgcaaagtgcaggaagagcaacatcagcggctgctcaatgaacagaaacagaaattcctggacggggaacggatcacgggagaaatgttccttgaaatcaccggaagggacggttttgacatccatatcagaaccaaagggacattcaacaggcatgtgaggggcattgacaggaacggaaccgtcagtttccggaaaatcaagggctgccggactccggactttaccggatgccataaggccgtgtccgtctatctggcgttcataacagaaaaagagggcaaataattaaatccggggcggtaacggtctgctccatgcagctgttaccgctaccggcttccggcctcacaattcacggttcagcgccattgccagcggaaacatcaaccggttataggctttaagcttttgcaaattcagtacatatccggcatagggattggtcagatcggtatagaagaatacatcggtaaatcccgcgtgttcctccacgacttcaccctccaacggaatctcctccacattgaaccgctccagaggtagttcttccagacgggtctgttccgcatttcccaacacattgaggttacggttaaacagcacgaatcctttcttcctgtaatccacacgcataccgtacggacgctccacaaggaaagcatccgccgctttctttacatagttttccataatcctgaaattagaaattgcaaaaatacagcatttgtccggcaatggcgaacaaatcaggaagattatctaaggaatccacacaaaatcccacaacaaaaaacaaccgtatattttatttcccaccctgcaaaggtagtcccgtgtcctgtgtacccgtacaaggtcaggcccctgcggggttggctgaaagaaaatcatcctcgcttcgctgcggtattttctttcgccaaaccttgcgggtacggccacgggactgtcaggcaggcgagaaataaaaataccggctcccggagccggacgtgtttaactgataaaaatacaaaagttatgaaaatcctgaatgaagaacatttcgagaacgtaaagcgctatgccgaatccatcggtgacacctcacttcaaaagtgcttggaacggttgaagagttgggaagggaatcctgattatccctgcgaaatctcactctactatgaccatgccccgtactcgttcggcttcacacagcactatcccgacggaaggacaggtatcgtgggaggtctgctctatcatggaatacctgacaggtcgtttgccgtaacattgcagccgttccacggatggcagatacatacctgaaaaacatgaaacttgacaatgaccgaaaagcagacttcagaacagagaatccgaggtctgctttttcatttcttgctgtaaagatagccgttttccgggctgattgtgcaaggcggcccctttcaggggctgggttggctgaaagaaaatcatcctcgcttcgctgcggtattttctttcgccaagccttgccgcaatccccggaaaacagacaggaaagacatcaagaaataaaaatgcctacccatgtaggccgatgttttacttaaaaaagaacagatatggaaacactggattataaccagctgctgcttgtctccctgtggcaatacaaccaccacggggatgaagggctgactcctgcacttttcgaggaaacgttcggaaaggtctatggaggtcactattacgaaaaatggaccggctacttcaatcggaatctctgggacatgattgcctatttcagaagcgagaaggagaacggacagaagttctgcgacatggttgcccgtcaggtcaaattgtatcaacaaaaacgatctcaatatgaagtacggtaatttttatgacctggaaagtctgactctgctcaacaggcatgaagggtgtgcctgctccataaaggaatgtgatgtggagaaggtgaaccggctgatttcaaggatgcgggaggacagggaaagagccggtttaccgactgcaggagacgttgtcacttatatcacccgtggcggtgactattatccgcaggcacacattgaaaggggcgatgaccgggaagttcatatctgccttctcccacagacacctttttgccatgaaaatgaaaagtgtaccggttacaataccgaaggaggcccttgggttacaaccggtccggaattgctgattcccgatggcatacgcagcaaacagttccggatgtgggggcataccggaaggcacaggaacggtgccgtcctcttccacacattcgtcagggcatggaaatacacggaacccgatcctctgtacggaaagtacaccacaaaagaatggaagagatacctcatcgagtgtcagccggatattgaaccggctgatgcctttgtctatcggaatgaggcattcaccctttactcgcgggaagaactggaacggctggtcgggattctgcacggaaagcttttcaacggattccgtcccggtctgttcatactctgggcataccgtatggaatggaaggaacttcccgcatgggaatggaacatgctgaaagcggacacccatctctctttccttggcatttctcccgtcaggatacagactgaccataaaagacatatagtaacaatctataaaaaatcagagtaatatggtaccatacaacacaccgcaggcgatacgtccgcttgagaaaatggtctgtgatttcgcctattcgaacggctacgatccgatatccgttttcaacgatttcctgcgctatgtcattcacgggttctctcccggcgcaccgccccttatggactggaaatacaaacggcagcagaacaggcattttatggaaatgcttaccggatggatacggctcatgcagcgggaattgcaatccggcggatggtttgatgcgttcggtgacctcttcatggcaatatcctccaaaagcggtcggcaggtgaacggacagttcttcactccgccggatatctgcgacctgatggtcttatgtaccgattcgggggagacagcgacaggaaaacgtatctgtgacccgacatgcggaagcggaaggctgctgctggcatatcatgtacgccacctgggtaattatctggttgcagaggatgtcagccgtacctgttgcctgatgaccgtttgcaacatgctcgtacatggctgcataggtgaggtcatccaccatgacagcctctgccccgaaaacttcatggacggctggatggtaaaccatacgctgacccggacgggcattccctccattcgccggatgagtgaggaggaatatcggacaagcaggaacatgtccgttgacctgctcagaaagcggaaagagaaattgcgccaaatgcagcctggcaagaaacaattgccatataaacaacagaatttataaacaataaaccgaatgattatgaaactgaatgttagcaacgaattgaaatcccgcctgacccatgcggcggaaaacggaagtgtgatagccaaagatatcctttcggaagtaaaaaagaatgtaccggtggaagaagtcatacgggggtcctacaattttttctccaccaaacgcaaacggacggaagccggcacgttcaagaaaatccggatcgtgttcacggcatgcaacaaagacttgggccatcccaatttcccggaccggaacaatccgcaggcaccctggtttccggagaaccggacagatctggaaccgtccacgtttatcgagctgttcaaaaatctgggaccgtaccagcccgatgaaatcaactatttctgcagcgccatctcactggacagcaaggtcacaatcagactgcatgacagtatgaacgattttatggaggcttatctggaaagcaactatagtcccatatctgacggtagcgaatccagcctgcacaactcctgtatgagatatgaagacaaggcccgtaatgcagcggatttctatgccaatttcgcaggagccaaaatactcgtggcaagggatgacagcagcaatgtggtcggacgggccattgtatggaacgagataacattgtggaaatcaataaacacaccgattgccgcctccctgctggatcgtatctattcctcacacgcattcgtcgtcgaactgatccgcaagcaggcgcaggaggcaggcatcctgttgcgacgcagatacaacgattatacacatacgacggatttcaccgtactgaatcccattgaggggcaggaatgggcggccggagataatatacaggtctctttgacggtgaaagtgcccgcctgcaggtggcacaagaaaggggtgccttacctcgacacgttctacagccttcatctgacggacggtaacctggaactgagaaatacggagggcgacacgagcatagccacctgccggagcacggaagggtgtgcaaacaggaaaaaatatgtatgtcccaaatgcgggaagatacatatcttcccggatgcggcattctgcaagaactgtcaggatatgtactatgtatctaccgtattcgggaaagtcctgaaaggattatcagtggaatataaaggaaagaaatatccgtcttttctctttcgtaaagggcgtcccgtaccggaattcagacgatacctgcaaatcgaaaaattgttcatttcctaaaatatcattatcatggaaaaactaatggctctttacggcatttcttccccctctggcagagaggggaagatggctaaattcatcatagaggaactcaaaaggatggagattcctttccggcaagacaggtacggaaacatctatgcggtcaaaggcaaccgggaaagctacccctgtgtcgtggcgcacatggatgaggtacaccggcgcaagacaggctcttatgcagcccatcttgtggcggactcgatgattgtcggctatgatcacaagcgtaaacggatgaccggaatcggtgcggatgacaagaacggcatctggatctgcctgaaatgcctggaggattgcaagacggtgaaatgtgccttcttcgtacaggaggaggtgggatgcataggcagcagccatgccgatatgtccttcttttccgattgccgtttcgtgattcagtgtgaccggaaagggaacggggatatggtaacacaaatcaatgggatgaagctctgctccaacgagttcatttcagctatagatgtccggaagtacggctacaagccggcacagggactgaatacagatgtggcggctttgaaaaggaacggtctggaagtatcctgtatcaatctttcctgtggatattacgaacctcatacggacaacgaatataccgtcgtggctgatctttgcaagtgttaccgctttgtccggcatatcatctgctgccacaagggaaccagcatgcatataccggaagcggggaaaaaaactttccccggatattatgaactgttcgggctgaccggatatagcgaagaggattatatccgtttgtcagaagaaaaatacatgggacatgctaaaacaaccaagacaagctctaagaataaattctgattcatcaacattaaaaacatagtattatggaaacaacagtaatgccggcagctgcatcggtacagaagcagcagggcctcaaccaggtagtcattaacaaggtacagcggatgatagaaggcaggcaaggtggtgtcatggacaccattaaccgtctgctcagtgagggacggatcgcgcaggatttcatcgctcccatcggggtaagccaacgtagcaaggaacgccccgttatctctttcaaagcggaaggaagggtacagatggcaatgcccgaagggaacttcaacctgcacggcaacgccataagccagatttcggagaagatgggcattcccgccaaatacctgcgcgagctttccgccggggatgtttggcagaaacagttgtgcgccaccatcctgaacgagcattcgggatggaccgagcgtacacgggtactgatacgggcggtaggaatggaagtccggggcgtattgtcggactcctaccgtcggctgaactcggtggatatactgaccgctttcatccgtgaggcgggaggacagggagcggtcgtgtccgatgcctatatgaacgacacgaaagtatggtgtgaaacaatcctgcccactccgatagagatacccacccgtaagaacggaacggtcatcatcttcgcaggagcacgcttctccacatccgactatggcaacggatcggtcgatatgcggtcgttcctgctcaacggggcgtgcctgaacgggatggtcagggagtccgtcatgcggcagatacaccttggaggccgactgccggaatccctgtccctctcccaaaagacctacgaactggacacgcagaccaccgtatcggctgtttccgacctgaccaaaggactgtacagcaaagacaccatcatgcagaaggccatcgaaattcaaggagcatcggagatagacgtggatttcgacaaggaactgaagaatctggtgcagaaaggagccttgttgaaaaacgagggacgtgaggtcgagaaactgctgatgaacaacaatcctgacgacggagttacaggcggggccacgctatggaaactgacacagggaatcaccgcctttgcaagggaacagcagccagaacgctgccgggaactgcatgaaatttcgggacagctgatgaaccgggtaaagataaattaagagaataacaaccgaattgtatgacaagggcggccgtgagtcgcccgtaaagcagaagaacaatggaaaataatatagtgtgcagcagatgcggatcggccaatgtcaggtgtgaggcaatggtaaaccccaacacaaaagagttcgaccacttcacggacgaagctttttattacgggtggtgcgaaaactgcggattgggagttgccctgaccgacaaggaggaaatccggaacgaaattttggagaaataccacaggttcaagaaagagaatgcttgtgagccacattacgcaaattgccggattgtccaaagggacagcggtcaggtcaaggatgtaagaattatgctttcaccggacaccggtatggccgatgacggtattttcttttactgccacacattggaaagccttattgggctgtccgttcccggcagggaaagtttcacccttacggaatgtttcggttttgccttgctgacagacagggaaaagatggaacggcaggtatttaaacatgaagcggacggaaagcccgttatcgtaacaggcagggaagtgctgcttttctatgggaagcactatggtataagaccggaagaattgaagcaatacgcaacggagtattgctgccatatcaaacattacagggaatatggatatccgttgctggacaggtccctcgtgaaaaaaatgctggaggaagaggaacggattacaaaaggggaaacacggtcattcactctgcggatacactttccttggcatgtgaaaatcacaaaagaggataatcctgaatatgccccatacagatatgccttgaatgcctattgcctggacaatccgcaatgttttaaccgcagatacaccactttggagaaagccttgctccattgtctgaatggattcaatgaaaatgccacaatcaaagaccggtatctttcaataggggaatacttgcttcaaaagtaagaatagcagacaaatacatcttaaaaaaacagaaacgtcacaaggtgatgtatatcacatcatacctgtggcgtttctgtttttagccctttcccattttatgactctgcccgctttgtaaatgtatctaatttgactattcaagtcattttatccaagcagctatttgctcgttatttaacttgaacagggtaagtatatggaattaaattttgattatagtgcactctaaataaaagactatctccttccagaaaagcatcaactaaatcaggattcttgtttttttagttgctgaatactttcaatatgtaatgtgtctttatggttttcgttcatataatcataatatggttgggaaaaatgtccttatttattatttatatgaggtgagtatttacgacaataccctaaataggcttgtctgatttataataactgattaaacattaacgggaataaccttgatagctattcccgttattttcttactcgttttccagtttctccatcatatgctgacagtagttacaataaccgccattatcaagagcttcaagcatttcagaccaaggaatatcacaagcacatctttgacattcctcaacgctgttattcctaatcatcttattaaagacatacttttgtttatcagataaattgtcatatcctttgtccaacatccttttagctataccagcttctttgtcatctaaacgaccagactttatcaagtcctccagaaaaccttcaaaatcttcttcaataaatctttcttctttcatattccaatatttaaaaatctatttttcccagtttaaataacacattacagtccgttatcttttcaacttcagacatacccaagtataaacgagtataatcgggtgcggtaagagcaagtttattaccaatcacttctctaaccaaataagcttttgtcttattccctatggggtaaattcaatccaatatttataccatattttgttcaattttacagtgttaaacgaatccttttcctcctgatactacgaatattaggggacacttttatatgtacaagaggtatgcctatatctctattctgacaaaatgtcactcatatatctttcccaaagttttatatatagaataaagaaaatttgtaagtatgaacagaacaataatttcaattgaagtacaagcccacaatggtaaggaagccactatcattgtcaaaggagaacagaacaatcagattatgtttgaaaagcaattcgagtataaagacgaagaaaagcattctttgcggttacacttactttcagaaaggtttcatcgcaaattgccacaattaggtgatagcttaggcgttttttgtatccgtaaacttttcaatgatataacgatacgaagtaaaagttcacgaaacatcatatcgtctatgctatgcagtatcttcccccaaaccggaaaaggttctgcatgagaaaagaaagcggaacgctgccgatccgtatcaacaagcatcatatccaaaatacaattgctgccattagattccatttctatatatatgtttcctcctaacattcctgttacaggtcttcctttacggtctatattacgggaaaaacagtatttatactttagtagattgcatttgtagccatttatttccaatattatttctgaattcatgacgacttgttttatgcatttgacattacatctcaaacttagcaaaaaatcaagaaagacaatgttcaaagagcattttttatgcaccatatgctcaataacacattttatgtctttcggttacattaaaatacaacacctgttagggatatgttcataccggacaaataaaaaagattcggtcgtctcgtaacaaccaaacctttatcaacaagcaatctacggtatatagaacagttcaaactcctcttttcttcttctctctatgcttggaatgactttcccccgataacagcggaacgatacatattccttgtaaatatcccggttgccgctgtccagtttctgaatcagtttgcttttaggtatcttgccgttgccgatcagacggtaacagcctacattaaagcctaacagacttaaaaggagcgaatctttcccatattttcggaataccttcaaacaccgttcaaggtcgcatctcaaaagtgagtccgcctgtgcctcactcaggttctcggtcagcgtctcgtggggaagcaggcggtgtccgtaaccgatgtaaggcattttcccccggtgccagccttcccaccgcttgatgcaggctaccgccttatctttgtcagacgggggattttccgccttgccgtacaagacaagtaacagaaagatcataacagccggtattcttttcatgcagcctccttgttattttcttcatccgtatcctttccattaaaatcatatgtcaattgttgcagattcccccaattatcttcaagatagaggtctatggtctgggattccttgccgctttgcgaagtatagtaaagacggaatttccattcgttcagcagataacggtcattgggcttcagtaccgttccgtcctccatcttcagactgcccttaccatccggctggaaataccttagcgtatagacggttccggtaaagttcccttccggcttgatttccagccggatttccacagtctccccatcggtaatctcatccgctaccggcatggcttctaccgcaaacgggtattcctgtttgatatccagctcattgtcacaagcgacaagaccaagaaaggagaatgccatacagcaggctgtcagcataaaatcaaggatttttcttttcatgggtatgtattcttttaaggttagaaaatgtattttactccgattccatactggaagtggcagattcccgaggcgctgccccacacgaaacgctcacgcagacgcaccagcaggacaaccctgtcggacaggtatccttccgcttccagcgttaccgcgccgccatagatgaaagactcgcattgctgcaaaacggctccgtcatccagcagccggtctccttcgttcacggtctcatagcccaacagggcggaagcgccgaggttcaggaagaaggacttgccgggggtggaaaagaacgtatggtaataaccgccttcccccgtatattgcgacaagggtatatgcgtactccggtaagggatgttacgtttcagcatctcaccgccaaacatccactggtttctgttcccggtacaggtggatacagccagcgagaaggcatagcctgcatcgtgacggtttgcccggctgtaaaatccgtcggccatttcagtggtgaagcggacggctttcattcccggcaggcggcgttgggcttctgcctgccccgtaaagagggcaagcaggagggtaataaagagggagtttcttttcatggcgttcatctgactttcagttcattgacggtttctgcgcgtaccaggtcctcattctctacatcaaaggactgatgccggccgccttgcttctcatacatttccactatcagcttcttgtcgtcgggaatggtgaacttgggcagggcaaacaccgtccgctcgttcttcttcccgtccacacgggtcacatagttgaaggcacgaagcggatagatgacctgttcctgcatggcggtacgtttcatgattttcttgtccacgatcttgaaggtcacgaagtccacgtcgaaaggcacgttcgtggcgttcttcacttcggtatggaaatagatcagttcgccgtgcgcataaagtcctttaagcagatattgcactccgaaccgtttgcagccgatgtgcttgaccttgcgtttgttctgttcatacacggatttcatgatcagccgtaccagacggggagactccccggcgagttcctgcaagtagatttccatcgcattgttcggacggttcacggcctctccgtcatggatgaagtcgcacatttccacattcagcagcaaaggctcgtcggcatacttgacgttgaatgtatagaagttgccgtcttcggtaattacgctcatgtttgtctcactccggaaatgtttccgggttgccttcacacggatcacattttccgcaccgtccgccttgcccgctatcagattgggcgaacccaggtccacatatctcacgggagagggaaaaataatatgtacggtcttgtcatatgtgatttccagaccgtgtgggggaatcatccggctgaatccgatcttgcggctcagtccttcataataatccccgctgctctgctgcgcgtatgcagccactgtgcccgcaatcagggcaagcatcatcagaatcttcttcatgtgtgtttcttggttgattggtgaataaatggttgatttcctttcctccttcatttttcaggagaatgcagcaacagccggtgtccggccttcagggtgattttcaccgtgcgcatcttcttgcccacatattgtgacataccctgtatcacccccttgcccacatccgaggcaatctgcgctccggcatccgttgagatattgatgctgcttcctatagaggtgcccatgccggcggcaatctcacgtgcggcatcatactccatcgagttcggtacaaggattccctgctgcccgtcagcgtcatacacttcgagttccaccggaaacagcgtgcccctgtactccactgtctcgatcaggattcccatccgttccccctcgacacgtgtaccgccgaccagtaccgtacctttggggataaggagatcgtccactgccatcggctcaagcaggcggatacgcagtgcctgtccgtcagatacggtctgcgtgccatgcacacaggcggcgatggtgttcctgccggaagatggcattttgcctaccggggtgtggaagccggtatttctctcgcctgcatatccggaagcaatgtcttcattgcctgcaggctgggcgagtgatgacaccatccggttctgtacccgttttacaggccggacagccgtccgttctttccggctgtttggggcattggccgtagaggaagcatcaggctctttcccgttgtagcgggcagccagctcgtaggacttttccagcagagccatcttttcttccagggtctggccttccgcctgttcttccgccggcttcctttctttttccagatcctcaatacggcggagcagatcggcatctggctgattttcattccgggtatatacagtgcccagcgaacggttcatattccggtaggcttctgcagaggaacggatggagccgggggctttccccttttccggttccggcggaagttccatgtttgcttttcctgcagtaagaccggcagtatcctgaccgcccttgttgagcagttcggacatctcctggaaggttcccctgcgccatttttccttttttgccagtgcttcctgctcataggcgcttaccttgttgccctccatttccgaatcttccggtgaaggcatctccacgttgaaacccttgcctttttccatttccgccttctccttttccgacggactgaataccagcaggaggaaccccatgcacagcaggcagagaaacggatagacaatatactttgcgcgccggcgcttctcttcgggagtcagcggcttgtcatttgacactccgagccgttccctgattttctgaaagtccattttcatgtttatggatgtttgaatgaatgtttcttgttctttccgaccggaacacgacggaacggatatgtcccattgccggtctttggcccggctccccgaaacgggatacacaggagagaatcgagtacagacaggaggcagcaagcaggaacgagaccgtgcctgccagaaggatgcgctgctttcctgtcagccgccggcagaacagccgtacccggctgtccgcatggccgaagaatccgcgttttcccctcatcgttccgcacttcttatgtccttattctccagcacggtaaactgctcgataatgaatccgttgggattgtcatccgaacgtcctgtgttttgaagcgagcaggaagttacgaggctgcgctcggtcacgttgctttcacggataatcagctgccgggcgtatgtccgcaccttgtaagggtaggcggcaaagtcgcacaccacgctgtccacatgcaccacctggttgatgttgcctgaaatcaggcggttgtaataccctctttcggcaaaatccacatagtagtgataggcactcttgtctgccagttgcagggcacggttgatattgtgctcgatggcatccttctggggtgagagcgagaaaaacagttcgtgaaagcgccttacatgttcccgcgcctcggcaggcctgttctgtgagaggtcctgcgaaagggccatcatcagcgatttgcccccgtcaagcacatagattttctcgcgttgcttctcggcaaagcggtatgagctccacagcgcatatccggtaacgagcgcacagcagcaggcaaagaccgccagcagcaggcggatgcgcttgaagctgctctcaatgtttgtcaatgacttgaattccatttttttgatgtctggtttgaatgaataaatatttccggtatgacgggacatcccgttccgacaagtcaccggacccgtcatcttgggttgcccgactcatgggaaggaggctccgcagggtttatttgcccctcagcctgcctccgatattccccaatacggcaccgcctgctccggctgcaagcccccctgtcttggtggctgtacggttcaggttacggctgaagtttccggcaccgcctgcctgcactatccagcctgctaccgtaggcacggtgaagtatccgataatcccgatcagcataaagatgatgtagacactgttcgagttgtctatcgagtagtccggattgttctgcagttcctgaatgtcattctgaagcatcagtacctgaagcttggcaagcagggtgctgaacaggtcgctgaccggaagccacaggtaaacggaaatatatctcgtgaaccactgtccgagcgtggactggaatccgtcccatacactgaaggcgaacgctaccggtcccagtatcgagagtacgaccaggaaaaaagtcctcacggtgtctatcagcagcgatgccgctgcgaatatcagctccagcaggctgcggaatgcatcccggattttcttttccagattatacatcccgacttccacatacatgcccagccgggaggcggtatctatggttgaccagcccagttcatccagctgacggtcaaactcctcgtcacttaccagatatgctgtttcgggattgcggagcatggcctccttttccagttcctccttttggatccggtactgttccatatccatcgtctgtccttcgagcatcttgtgtgtgccctgcacgatgggactgagaatattgttcagcgtgccgagcaccagcgtgggaaagagcaggatgcagatgcctatggcaaagggacgcagcaggggataaacatctatcggttcggcacgtgccatcgactgccatacacggacggcaacgtagaacaacgcacccagtccggcaagtcccttgcccacgtccatcatgtcctcgcaaaggggaagcatctcgtcatacagggttgccagtatggtgtgcaggttggcaaaatctatcgacaacggcatcatggctaccagtatttggaggtttcattcccatagagccgcatcacacgttccaggtcgttcttctttctggccctgaggtagcttacggctatgttcttgttcgtataatagctcacaaggttgcggtaacggcgcatctcgtaatagcagttgtccaccacgtccatacggtccttgtcggtcatggacagggtactgacattgataacctgtttcagatcctgcaacacgccgttgctctcttccagcaggcgggtgtaaccgaaggcgatggcgtccagttcgcgcggtgagaagttttcatcgttcatcatcttgccgaagttggttacatagatgtcggacacgtcgcccaccatcaggatgatgtcacgcaccttgcgggcatcctgtatcaggttgttgaccgatttcagctggtcgtaatatttcttggcctgctcatagatctttactgtctcggcaaagctttctgccgtattgactgccgtctttgaggtatgggcgatattgtccgacatgtttatgatgctttgggccagattgccgggatctgtcaccacccattgggcgcgtgctccggtaacgcccagtacaaatgccgttccgatcagaagcgttcttgccttcatgcccgttcctccttccttacatagtctccgcccggtgagaatgtcagcacgtcgactgcctcattgtaggacacatcgacacggtagcccgtattgacaaacaggtttccgttttcttccaccagcaggtaagtctgcggcttcagccttcgggttctcccgctacgggaaaacaccgtcaccttatagcattctccttccttgtataccagcacgtcaggtctgccttccacgctggtccacgttccgcagatcttgtcgcggtcgataccgctttccgaacagctctgtaatatcatggcggccatgcttatcagacataccgccagcctcataaggggtctgtttctcataatcgttttcatttcgggtttgatacctgtttctgttcctctcgctttttctccgccagacggcggatggctccttccagactgccctccggtcctccggcaatccgttgtacttccagtttctccgactcctcggtcgtgaacgtgaagtattcttcctcgctcacttccgtggcatatactgccgagcaggttcctccaagccctatccatacttcccggtagaagcgcccgggatggttcgcctggttgatggaaagaatctgccctttctctttctcggtcagaccgagcagccgctggatgtgctcgaacttgttcatgtatttccgctggtcaagcaggatcttgcagtcagagttgttgatgatggcctctttcacaatcggggagctgatgatgtcgtccacctcctgtgtcaccaccacagcctcgccgaaatattttctgacggtcttaaaaaggtacttgatgtattcactcatattggcggacatcagggctttgccgggtaggtcaggggcattactgcccctttcccccctcagaaccgtacgtgaaagtttccaatcatacggctcaagcggtgttaaatttctattcaatagaaaccagctcatagttacatctttttagtttgaatgacttttcttctacaactgtcatgcagcaggaaatttactttcttgccgttgactatttgttgggaagttccccaaggatgtttcttgtctatgggtttaccacatacgggacataaatggttctgtctttcccacatgtacagcaacgattttctaccgttgagtgactgtagcatcttgtaagtcttgcgcttttcaaaatactctgtccattcggggtcaaagggatttgcttcaccttttaccttgacatatcgggtaatctttgtgtcatacagccttttcaatgcaatcctgtcatcagtcttgcctttcttgaagtttgccacgaagcaccagttacggttttttacccgtgtgaagtatcggtcggcaatccaatatttgcctttcttggggtgtcgtctcttggcccattgccataacttttcaaatatcaggtagtcagcttttctgaatgtgtcagaagccacacaattcttatagtagtttacccagcctgttatcacaggattcaagagccttataagtgattcctgcttgcttcctttattggaatcaatgattccccggattttctgcatgaatttcttcaggctctttttggatggtttaattagaagtactcctttgtattttcggatattgtacccaagaaagtcaaatccgtcatcaatgtgtgtaatctttgttttctcttccgacagggttaatcccctttctttgagaaagtccactactaacggtttgatttcttccaaagcttccttgcttctacccgtgatgataaaatcatccgcatagcgtacaagatgtactttgggatagtagatcgttttcctgtttacaaatttcttgtgatacttctctgcaagcatagtttgcagtccgtccagtgttatattcgcaagagttggtgaaatgataccgccctgtggagtaccctcttccgtggggaatagctccttgttgaagacgaaaccgcatttgagccatttccgcagcatcactttatccatagggatattgttcagtagccattcatggctgatgtggtcgaaacaacctttgatgtcaccctccataatccattcgggagaagctttctttgcaaggacacaaaaacattgttcccttgcatctccagtacttctctctttacggaaaccgtaggaattactgtccgcagttgtttccgatactggttccagcgcaagcagatacaaagcctgcattgccctgtctttcatcgttggaatacctaaagggcgtaacttaccattgctctttttgatattgaccctctttaatggctggggtttgtagcctcctcttttcagttcgccgattgccttgaatctggctttgggagttgaccattttaccttgtcaacgcctgcggtgtcactgcctctgtttgatgtaacacgttttacggctaaagccttagcgtaaaacgagtgcgttagcacccactgcaaagcttttactctgccgtgtttgccagccttttgagcttttacaatacgcgcttgtagcttattaaccgccatttcacacttgttccagtctatgctttcccaagtgttccatttccggtcagtagatgcacacgatgtttgaatttcgttcatttgcttttctcctttcataagttccataagtttcttgtaaaacaaccaccatgcggaagtctgcccactttcgtgtgaggtgatgtttcaacctctatccgtcccgttacaggatggcgttcgctttttccacattcctctgcccgcactccattcggcttcacttacggtctgcttacctgctgttacacaggagaagtacgggtttaccatgtttcttgtatatgacaaatgaatgggttagaatccgtctatccgccgacagtctttatatccgtgtaattccatgctggagggaattatctgactgcgtcccttttgggttagagcccagtatcattggcggctcattcgaagttacgacgtttatcaacggttcacattacattattcataccattcagcctagctcccatgccattcgatactaacggcagttgtcatcccctcgcggttcagacttctcctttaggaagggctacgttgttggttctgttgacgcacgagttcattacttaatgtcgcacgttcccataggctactgttgacggaacaacaggtttaatcattctatttccaactcgtggaattgaacgtcaaacaatcatatacaaaacttacatgtcacagccagcattcctctatcaatatcatcttacggatacctttgagcctgcgcatcttggcgatgaaagtttccataatgatcagtgtcaccactggaagaagcactttgttgctgctgatattgtccagttcgaatacgatgaaccgtttgcctgtcaggtccagttccttgtcggagttcagcaggaagtcataatctccgccccggtagaacggttccagaacgttcaaaaaaccgtcaatgtcaaaatccttctcacgcacctttttctcttcaatcattcttctgtagtcatcggcgacaaactcatagaaaccgttgaagtccggtctgatgttccggttctccgaaatctttcggatataggcgttcactgctccggaaagagcgacctcctccgaacgtttcggcgactcgtcctcccgtttccacaaggtcagtatcagcgtgttgatactgtcacgcttctccacatcgaattttccggattcggtgtagaacgggttgaaggatatcggattgtcctcttcatacgtgatgtaaatcccgtccttcccgttggtacggtcatggatcatcctgcacagcccctggtagctgtttccagtgtccaccagcaggatatgcgctccctgttcgtagtattggcggacaaggtggttggtgaaaaaggattttccgctgcccgaaggcccaagaatgaacttatttctgttggtgatgattcctcgcttcatgggcaggtcggaaatatccacatgcaccggtatcccgttctggcggtctgccagccggatgccgaacggactgggcgagctcctgtaattggtctctccggcaaagaggcatacggcctgttccaggaaggtataaaaggattcttcagatggaaagtcgcctgcatttccggggattcccgcccaatagatgaccggtgtgtcaatggtgttataccttggcgtgcattccatcatggccagctggctgcccgtgtcgttcctgatgcggcggaactcttccgcatcctccgcccaggcgatgacgttgcagtggcatctgacgggaagcactcctttggtatgtgcctcatcaagatacatctccgtccactcctggttaatggcattgctccggctgtattttgacaacgagagcatattgcgcgagtttttctccatcatctgcaggatttcctgtgcgtcgtcgatgaacacgtattgcgaatatatgtggttgcatgacagcagcagtcctacgggtgcggcaaaggagaggcggcagtcgctgcggtccgtggacatcctctcgtagcgcatgtccgtggaaagtctgccgggcaggtcttccgtatcggaaagggtatgcaggcagaggcgtttgtcaccgatgcgcatcctgccgggcttgaggcagatgtcctgcaatacggcggtctcatccttcagcgagagggaaaagtatttttccaccagtccgggacgttccttcgtaccggtgatttcgtctgtttccagacggcgaagccttatatgtccggaatcattcataatacgctcgaactgttccaccgcctcaagaaagcgggcggcagcatccttgtcggttatctctttgggcaacaggaatccccggcaaagggtattgaagtcactcttccgacggctgcgttcgcgggttgtcttcgtcaggaacaggtagcatttgtgattcaggtaaggtctttcattgaaatgcagctcatagctgcgtgtcaagaagctctgttctccgtcatcggtcttcggacggtaggtttccttgacgaaccagtcctgtttgcagacgacactatgttccggcaataccttcatggctttgatccaggaggagtgcatggcctcatactcgtctgccgttaccgtgtacagttcgggcagttccacttcgaaagccacggtcaggtctgcatccttgctcacgatacagccgttttctaccgatagcagggggaatctgcgttccagcgtttccgcctttaatacatttctcatgattgttgtttttttcttcttgtgaataatctgaaaactctcttgcggtgaatcagatagcgtggatgtcgtttttcagccagcagcttcatcagcccgtgttcaccgtaacgggcattcaaacggaatatcacccacaccaacaggctgccggacaggattccgaaggataagcatatccattggtccacccccgtcaggtaaagaaagactaccataaggagcaccatcgcaagccctccggcaaagacgaacaggtattgcgacttgagtcctttgaactcgacggggttgccggcacctttgtttaccggatattccataggctttagaggaagaaggaacgtaagatggtggcggctacgatcagaaagatacaggcaaagaaccagctggcggcggttttcgaagtgtcaggatctccgctggaaaatttgccataggtcttgataccgcctaccagaccaagcaccgcaccgatggcatagcatagtttggtggcgggatcgaaatacgaggtcatgaggctggttgcctcgttgatacccgcaaggccctggccctgcgcaaaggtgtttgcggcgatgaccgcacacatcacagaaaaaaggattcttcttttcattgtcgaatcgtttgggtaagacataaatttgaattcgacaacaaagataaatggggataatacgctatgattcagaggtgtcatcagatgtcatcaaatgtcatcagatgtctttgccgtacaacggatgaaaaagaaaaaacaggtttcctccactttggaagaatgcctgttgcatgttttcgttaaatgggtacatcatataaaaaatcccatatactttaacgcatacaggattttccgaacatgataaatattgccttttcagactagattcctccagtcagtaacatgtttgctttctttcctctctcttttcaaaggcaacgcattcccttccttatccacatacttccccatcagttcctcaatcagcttcttgttctccacctgggaggagaacagttcaaacatgtccgtttcccggatggaatgcagtgtcatggccgccctgtatgatttgttctcgtccgagccggcgccattcaggttaagcagcacgtcgcctacattgagcaggtcagcaggagtaaccatcggagcaatggcttccgtttcgggagagcggctgtccagttcctcctgttcatctttcagcattctcatctcctccaaaggcagtttgcattccacttcatcttccggaatatccttatccgctccgataaaatcacttccggtttccagttgctggctcatgtaaggggcgacggtcttcccggcattctcgtccagatagacaaagcgggtagctcccatcacatcctgtgcatttcccggttcaccgttgtctttttctgcttgtggccgattgcgaggagtacaaagcagatcacagattttacctattctctctttttgtttccataccttatataacagataagcggtacagccgaaccgtattgataaataaactatttcttccattctattggcttttgagttgcttcttgattatatatttcattgatgatatgctgatacctttccagatggtctgacagtacacttcctaaaaacatggggacagacatttccggtgcaatgaccggcaatactttggcaacagttctgtacaatgtatcgttaatataggtctgccttcttgctcccgacagtttcactttcagaaaccggctccggtattcatctgaatcagccgctccatccggtgctttttttatttgctgtctggaagaaccgcttttcttctcctgtttctccgaacaaggtccagcctgactttttgtttccggctcctcttccggaggaaccgttctttccaaagcggtcacatctcctgccatcatgcgtttcaatgcctcctcatccacttggtaatccgttcttcttttggtagtcataattgtttttattgaagtttcagtatggtttctatttccgctgccagcaggtccagactgcttcctttcattgcggaggaagatggagggaacaaagtgctgcggaacagaggccctttcattccggagtcttttttgtaacgttctgcactgggaatgacggtttccagtaccggcaatttcagcgaacggaaaatttcagtatagccgttatacaggtctttggaaacacgtttgtccatccggttccaaaacatatggataccacgcaagggtacatccttatgccggtgcatgtattcccggatggcaaggacaaaagacatgctgctccgcattgccattctttcctgcgtgatgggggtgaatacataatccatattgattacggactggaatacaccgggcacatttacggtacccggaaggtcaaaaaggacaagatcataatccagctccgatttttcaagaaagcgtccggccgtttcccgggcttcttccggagtggagttcaggatgctgtaggctttcctaccgcttgctccgaactgttccaccagctggttttgcagatgcacgttcttctcaatgtttcccacttcccagttccgcatggtactgatgctgtgctgtggataatcacaatccaccaccagtacgttataccccttcaggtaatggaagtaactggcgagcaataccgtgaacgtggattttcccacaccgcctttctggttgctcaaagcgacaaataaaggttctttcttcataggcttgaatttagagtgtataatttgtttcatatctgtccggattttttcgtttcatcacacggcaatgcatccgttggtatacggcaatgacgcattgtttgccggtttgcatgaatacattgcataccatattgcaccagtgtaataccggttgccgatgggcattgccatataaggtgcattgcattcatgcaatatggggttcaatgtatcccatactgcattgcacggatgcaatgtattccgtcatgcaggattgtcgtgcagcatatatggcattgcacatatatggatgatgccgcattcacaccatgcaccacctgtggcaggcaagcaataccccttacaggacaatgtttcaatgtatgccctcatgcactgtgccaaaagtagcggctatttttgaaacttccaccaacatttcccctacctgacatcagatgtcatcagatgtcatcaaatgtcatatcaaacgctgtttaccaatcggttatcactgtctaattttgcaaaatcggaatcagacgatggaaaagaactgacttcgtcggatcacagcgttccgtgaacgtcgcgcagcaatccgacgaaggagggttctctgttcaagcgaacagagcaagttgtgttttcgtccgacaaaaagtcttttgtccgacaaaaacaactagcccggctaaaagccgggggaatccgctccaaagtcgcggattccggaagagaaaaaagtacaaaccaaaaatctcatgtgcatggagaaaacaacagggacaaggacgggcagaaagcccaagagtgatccggcggaccgcaagtacagcttccgcctgaacgccgaggagaacacaagatttgaaaaattgctggcggattcgggagccggggaccgcacgctgttcatcaagaaatccatcttttcgggacagattaaagttgtgaaaatcgacaaggcgacaatggactactacatcaaactgaccgaattccacaggcagtttcaggccgtcggaaacaactacaatcaggttgtccggaccttgaagaacaatttcggggaaaaacgtgcgatggcattgctctacaggttggagaaactgagcatcgaactgatgcttgtatgtaaaaaagtcatggtgctaacccaggaatacgagcggaaatggttgcaaaaataagtcacggaacaagcctttacggagcacttgcctataactacgacaaggtaacggcaggtaccgccgagattctttcgggcaaccgcatgatttccgacagattgggattgcccagtgaggacatacgtctggcattgctctcttttgagaactacctgctggcaaaccgcaatacggagaagcccgtcctgcatatctccctttctccggcaccggaagaccagctgactgatgggcaattggtagagttggcggaacggtatatgcagaaaatgggctatgggaatcagccgtacatagcctacaaacatgccgatacccataatgcccacattcatatcgtcagtgtctgtgtagacggacagggaaaaaagatcagtgacgcctacgagcaccgccgttccatgaccgcctgtcgggaactggaaacggatttcggcttgcgcaacggagcggacacggaaaggcggaatccgaaagcggaactaaaaaaggtggatgcttccttgggggatgtccgccatcaggtaggcaacacccttaaagccgtactggaaagctaccgtttccagactttcggggaatacagcgcactgctttccacactcaacatcgaggcgaaacaggtcaggggggagtacaccggcataccctacaccggcattgtctattctgccacggatgataccggcaaggtggtcagtccgccgttcaagagttcacgtttcggaaaacgcttcgggaatgaactgttggaaaagcggatgttgatgaatctgaaagctctcaaagagggaaaatgggcaccctccatacaggcggacatcgcccgtgccttgcggcaggcggattcacggaaacggtttgtggaactgctggggcaaaaaaatatcgatgtggtgttccgtgagaatgagcggggacgtatctacggtgtcaccttcattgaccacgaccgacgggaagtgttcaacggttcacgcatgggcaaggagttttccgccaatgtgttcaacgactatttcaaatggttggaaaacatacccgaaaaggaacggggcggacattccgctacagaacttcggcagcatcaccgccacgaatccggcagcacgctcgaactggcggcgggcatactttcgatggaaaccaacccgcgtgactatgaggaggaagcctttgcacgccgcatgaagaaaaagaagaagaccggacgcaaacgtggcatttagacaaaacaagtatcaacccatttatatacaattcttatgcagcaggaagacgatttgagggcgcttgccaagatcatggaatttggcagggccgtgagtatttttcttttggtggtacacgtctatgtgtattgttatccgagtatcaccacgtggcacttgaaccttgcggtgatggacaggattctggtgaatttcaataatacgaccgggattttcaactgcattctctggagcaaactgttggcagtgcttctgctggccgtttcctgtctgggtacgcacggagtcaaaggtgaaaagataacctggcctaaaatttatgcggcgctggtggcaggatgcgcactgttctttctaaactggtggttgcttgagctgccattgccgcacgcggcaaataccgcattctatatttttactcttacggcaggctatctcgccctgctgatgtcggggctatggatgagccgcctttacaggcacaacctcatggaagatgtgttcaatatggaaaatgagagtttcatgcaggaaacccgactgatggagaatgagtattcggtaaatctcccaacgagattctattataaaaaacgctggaataacggatttgtcaatattgtcaatattttccgtgcctgcatggttatcgggacaccaggtagcggcaagtcctatgcgatagtcaacagttacatacgccagcttatagccaagggctttgcgatttacatctacgattacaagtttgatgacctgtccaccatagcctataattctttgttgaagaatatggacaagtacgaggtcaagccccggttctatgtcataaatttcgacgatccgcgcaggtctcaccgatgcaatcctatcaatccggaatttatgacggacatttccgatgcgtacgaggcgagctatacgataatgctcaacctcaatcgcacctggattgaaaagcagggtgacttttttgtagaatcccccatcattctgcttgctgcaataatctggtatttgaagatttacaagaacgggatttattgtacgttcccgcatgcggtggaattactgaacaagccttattcggacctgttcaccgtcctgacttcctatccggagttggaaaactacctttctcctttcatggatgcatggaaaggaggggcgcaggatcagctccagggccagattgcttcggcaaaaatcccccttacgcgtatgatttccccacaactatactgggtgatgacaggaaatgatttttcgttggatatcaacaatccgaaagaacccaaattactttgtgtcggcaacaatccggacaggcagaacatctattcggctgcactcggactatataattcccgtattgtcaaacttatcaacaagaaaagacagctcaaatgtgccgtaatcatcgatgagcttcccaccatttatttccgggggcttgacaatctgattgcaacggcacgaagcaacaaggtgggcgtacttttgggttttcaggatttcagccagctgacccgcgattatggtgaaaaggagtccaaggttattcagaacacggtaggaaatatattcagcgggcaggtggtcggagaaaccgcaaagacactttctgaacgcttcggcaaggtgctccagcagcgtcagtccgtttccatcaaccgtcaggatgtttccacttccatcaacacgcagcttgactcgcttatcccggcatccaagattgccaatctgtcgcaaggtacgtttgtcggggctgtggcggataattttggcgagaagatagaacagaaaatattccatgccgaaattgttgtagaccatgcggcggtcagtgcggaagaaaaggcctacaggaaaatccctttcatcaacgaattcaaggacaaggacggtaatgacatcatgatgcagcagattcagcgtaactacgaccagatcaagtcggacgcgcaggccatcatcaacgaagagatgggccgtatcaaaaacgatccggagttatgcaagcgattggggctggataatgaaaaaacatccaagaaggagtaatccttcctctcattaaatatcaagatgaagtgtgtggggggattttcccatcaatttcccccacatattattaggtcggagctctgcaataggggtattcctttcatctacttcccgaactccacgacaatctccgtcacttccccatgtactctccgcacattcagcacccgtgcaggaatcccatggttgaagcagcattggataaattccattccgatgaacactcctgtattgtattcccctgtatcgttcttcgtgtttttgcagaaagttacggttcctttcatcttttcattccttctcttgcggtattgcgcttccttttcaaacatcataaagacttctcctctgacaatctgcacctgttggccttcggtttgtaggaattgcaggtaactttccagcaggtcttccgggcatccgctatgggatagcatgtttcttatcccttgtatctgaatcgaattttccattgctttttatttggctatgattatctttttatccttgatgacaagtgtgtctttcccgccatgattcgtcaggcttacatccttcaagtcaatacggctgttggaaatggaaaactcctgatgaatcgtatcgttccgcaggaagtggatgtcctgtttgtacaggttcggaatggaaaagaacagggctatgattccgcccatgcagcataccatcaacagtgtaaaggcaacaaaccaccgctggtattttctgtcatccaaaaccttcacttcaaccggtgctggctcttcgttgattgttgcctttttctggttgcatatcacgcggcatctcaaattggggaattcatgcaggctgaacaggtctggaatctgttgcaggaattgcaagtattgtttggtttccatctgcacttccagttccatggttacacggatgacacttcttttcattatcttgggttttcctgttgcccccgtgggtttggctacattgacaggacggatgtccgatgcgcctgtgtctacactcatggcaagctccactccggtgtttcctaaagagggggaatccgtaggatggggtccaaaagatgaagaactttctgcaccttcatattccgctatcaggtctgctatttctcgcacctcggttactgccacgttctttgcctctgcattcacaaaggtttccactttggtcttcaccctgtcggtcagaaaggcttttatcttgtcttcgcttttcttatggataagatagcttggatacttcttcgtgaagttccgggctatattttccatataagatatactataatcataatttaaattaattgaaacataaactattgtatcaaccttaaaaacattctgtaacatatgtgttgatttgatattatctaattctttttaaatcgcccattaattgaataaccgtatcaatataaggagcaatctttactatttgaatattatcaatacaatcctttccacctgcaactaaagcaggaacatagccataacattcatctatcttaggcatcgccttcacttcctttattgtattatattcattcaataaaaaccaattttcaagacaactcttattgaaaattactatatttaacaatatgtcaatattttctgatagaattttaaaagttccataccttatattaataaaaacgacgtaatctccaattacatgattcttaacataagcaaaaatatctccaaaaacagttatcataaatggagtcactgtttcataatcatacataggataacattcctctataatatactgatagtcattcggtataatagttctaaacaagccattacaataaatgccaataccagctattctccaaaaagaaattagtttttccgaaaccaaattattgtattgtcggatataatcctcactaaactcttccaattttatagaatttccacttctttctaaaaatttctcaaacatactacttaacaatttctaagttttcaactaaatttacattcatctttatttttttctgctcctcttctgttataggaggagggtctgttattaattttaacaattcattttcaatattaagagaacgacctttttctatacttccccattgtgacccaatggacgaatttattcttttatttcccatttgagtcaccacatcaacatatcctcctgctatctgatcaggattatgtaatgctgctaagccttccaattctgagtcaaccattgcctctatagccttaatatccatatcttcatacaataaaagatactcatcaattttagcattcctatatctatccctaaaatcttcttgaattttcttagatttaggattacgcccatattttttaaaattctccctatttttcagccactcaaatatagtcatattatttattccatcctgctgcatttgcaattgcttcctcatttcaatttcataaaatggatctttttgaaatttcttctttaattgaaatggaggttttacaaaaattacagaaagacttttcttatttgaatcattgctaaccgaatcatctttcctctcggtagaagtttgatatataattgaaacatccgacaccttccacaccttctccctaacctccagattattccttttgataatccccggtgacaaatacagcaccatcatcatcggagagtttcctacactcatatactcttctattttcacacagaagcagtcccagaaccggaaaatgtccgcaatctccacttcgttgtagatgaaatggatttccccgttgtgcatggctccttcgttcagccagtcatagaagaactgttcttcacccttgcactcaaacgcaagcgtaatcaggtctccctcgaccggcagacactcccgattgccgatttcctcgcatacttggatgtggagttgtatgatttttctcagattcgggtcatcatagtgccggatgtggcaccgatagttataatagagtatcggcacctccattcctcttattttcagaatagtttcataaatcatgataatacagtttcaggtgaatgactatggtaataggtcacggctgatccaatagtatgtctgcccgttggactggaacggcttgccggcggcttcgtccagcagttttttcttttccttgaaatattcaatcagcatgtccagctccgcatccgtaatcattttctttttccgcaagtccttgacacggtaaacttcaaagaaaggatagtcggtcgggcaggaggtaaacctttgcaagacctctgataggggcattctcaggaaagtctttctccctaccttgcaatatctgtccctgttgcgctctgaaaggaaatgtctgaccagttttctccttgcacggcgggttgaggcatattccggtgcgttcaggctgtccgtctttacacgtacggtagattcttcggcatctgcctgtaggtagtcgtccggacagtcgcagatatccaccttcgcttgctttttctttttgaccgcttcgtatttatagtcaacgatcagcttggagggtgcttccacatactttctcaaccgtttgaactcctcttcgttgacaagcagataatagtccagtgtggaggacagcgagtccggcagtacgattggctgtgcaggcaggctccaggcaggttcggtatccggaagtacggatagcatggggtgtacccccgactggcggatatggtaataagctgtcattgtcgaatctgtcctatatcggtgtgtacccacttcgtcgaatgcccttgccagactgttgctcagcagggtattgtcaaacttcacttgtatcagcatggaatccacggcggtggtcagtccttccagttccagcgattcgttcttttgcggaaacaccagccatccctgtgtcatgctccgatttggaaagtccagacaataggtgttatggttcacctccgcatattcgttttcatttctgatttgttcgggatatacaatcagttcccgttttttccggctgatgcgtggtgccgagcaatctatcatgttcccgatttgcagcacgaagttgttgaagttatccggttctcctccgtagagctggaagccgatcatgcggcagttgttttttaccagcttgttcaccaaggtggagtctgcccactcgctgttgaaccctttatcgccgatgacaaccaggatattggtttcatctggacatttgttgaattgctccactccgatccgaaggccggaccagctgccgaatcgtccgtatgtaggtttcagttgctcggcattacgtgctttggcggaaaggaaatcaagcagctccatgtagtcgggagtcagtttgcagatggggtctttccggctgtccggttcgttgaaggtaagcacggcaccgaacctgaaagaaaagctgtcgtcattcaccagttgcgattgcagtccttggatggcattcaccacggctggaaaccgttggatggtgttctcttttccttccaggacaaacatgaggtttattttttgcaggtccttctctatcttgtttttgaaagtcccgtaatagattggattgccgttgacattcagcacatagctttcccgtttgtcgatgaccggcatcggaagccgggttttgaagcagaagctcgtgtcattgttccggtaggacagtaccgggctgtagcggatagcaggctggctggccgaaagttgcagtttccgcttcaggtcgttggatgatagcggcaaggtgtctttccgttccctgtctttaaaaacaagcgtgctgtccggcagcgaggttatgtctatatggagctgctgttcgggggcggtcagcaggcgttcgtctatccatccgatgacagcatgccctatgctgtctgcgtcaagctgcggcttgtctgccacgagggtgcatcctttgtcttccgatatttgataaggatatacgacactgtaaaatggaatcttgccagcctcttgtgtcaggtctgtatttttgaacagttttacggagtcgttggcaaaatacgtttttggggtggccaatgccacgctgtcgttcagcatgaccacctgtttgtttttgaatccggtaacaatgtcggtaaagccgctccgggtcagcaacaggtcgttttggttgatccatccgcagtattttgcctgtttccattctttcagtttcccgtttttcagaatggctgggtcgtattgaatgactctgagccagtctccttttcgcttgatgacgagaaatgcgtccatgtatttcacagactgcatctcgttctttccgctcggactcagataggatgttcctgcttcattggcaaagacaatccacggggtatgcttgggcagtgtctggctgcggggagcctttaccccttctatggaatagtttcgcatatattcacggggtacattctttatccgcataaaacggtgtaccggtccgcaggatgccatacagatgatgcacccgcaaatccatcctccttttatgagtgtcgatatgcaattctttttcatgcctcatttgtttttttgttcggaaaagcgttcgtgctgtgttaccatcagctgcatcacacattcgttgctcaggttgtctcccatatcgacgaacacctcgtctataagggttttcctgcgtgctatgattttcagtccttggcaataggaatagaaatcattcttcttgctgttgttgacggttaccgctatgtccggatttccgcaaaggtatttcttcaggatataattgtaatgggtattgaacggcttgccgtccacgatggcttgcaagtgttcacggatgtcattgccgatgatgacaagcacgtctgtcgagtcgttctccgtatattggggaaggatttcaatggtgtgccggaccggatattgggtattctccgtagtcagcagaacctcgtatatgccgggttctgtataggcgtagagtggattctgctcccgcgaatcgacaattccggattctccgaactgccagcgccattctttcgacggaccgtatcctttgaaagatacgatttctccttgaaaggcggttgccggtgctttcatcctgacaagctcgtcgcttccgtaatcatcccggctcctgtgtactgtgatgatctgtttcctttccagtcctccgtccacttgaaggcgcacttggtagcgtcccggtttcttgaacacgtattctccgctccgttcgtgtgatatgtccccgttgccgaattcccaaagccaggagcgtgcgttgcgggtgctgtctgcataatggaccgtttctccggtttccacctctatgggggtcagtgtcatacgcacggtgcggctggaaaagaacagccggatcagtatggcgacaaggatgcacagcagcatggctgcgattacgaacagaatctttctggtataaatttttcccatgtcatttgtttttagttcctgagcgcaagtcttcctcctttttctgcaagcctatctcgcactcctccagattggctttgaacagacttatgttttgtccgatactccatagctgtttcctgtcggacagccacatggcataaaagtcggcaatgtgcatgaacagcttgtatcgcttgtcccagctgttcctttcgtatgtgttccgcaggttgtttatcagataatggatgtcgtcttcttcatactgggcgtaaacgcccggttcaaatgtttctattttacggaacagggagtccaccggcaactggctttccgcttgttcctgctggaaatccttgatgcggttcatcttgatctttacgaactctttctgttcaaacatcttgaaatctgagttccacatgaagattaccagacaacacgctacggttgtcaggaaaaagaacaggaatacataggcatgtcccatgaatatttcccgtttgttcattgtctttctgttgttgtccatggctttccgttttattgtttgttgccgccggaacccacattcaggttacgccttgttttccagttgtcttggatgcactgcatcaggtctttcttcaccatctcttcctggatattcagcagacggatggagtcttttaccccgaggaagatgttgaggttttccagcagctgcctgtaaagcctgcaatctttggtgtccatgccttggacatatttgagcaggttcatcttgcgcgtactgacaacgctttgcaggagcttgtcgtttatttgcggtgaagtgttcatcagtttcatgtactggtagatggagtccatgctgttcgacagggacagctctttggcatagatatggtcatattccagtgcctgctccgtgattcgctttacttctatgccggaggttttcaggaaacaggcaaagatgcttaccgcaaggatggtgcagcatgtcagatagcccgcgaatctcagataggctttccttacttctgtgttgtttttcggtttcatataggatgatgttttatattcataaataggtgctgatacccagataggcgccttgttcggttggggttcccagcctgaaccgggcatcttcctgctggatgatgtagcggatctgtatctccttgtccgagggaaggaacagttctgtcagcgcattcagtattttactgtcggcagcgccgggaaagaagctctccatccgtcgggcggacagtggaccgatttctaccagcatctggtaggtgccgtcggcaaaactgtttcccagaaccatgtcgtctcccagaatgcagcttcccaatttgggaataaggcaggaatccacttccaccacgcatttgtctcctctcttgatatgcacgggcacaccggtcagaatggtcatgcactcgccggctttggagaggctcgctgtaatctgttccatataggccagcatatggataagcatgaccgccagatgggtcggcagcagttccagtacgggccattgaccggaaaagatgcttacgaaatccggatgtacgttcatctcgtcaatgcggcgttccttattctggaaggctaccagcatatggtccagggagatttcgaaaggcttgaagaaacggcgggcgaaaaattcctcttcgcggtggatgcggatttcgtccagcacctgttccttcgatattttctcggactggtaaaggttcttgtggaatatgccttcgggcagctcgtcataaaggcttctcctgttcacataaagatacaggtaatccgtcaggtcataatgggaatattccgggtggatgtcatggatgtctttcgagaatccgcgccggatgtctccccgtctgaatatgagggtacgctctgcatcatacccggcctctttcagtccgctggccaccacttccgccttgaagtcggtatccggcaggttgaatgaatgggaatgttcgtcaaaccgtactattttatcttgttcttccgtcatgtccgttcgcttataggggattagtccagtatgttccagcgtgactcgctcgattctttcggttgtctggagcgttcggcgacaacgatgttttccttgtgcttgccgatatattccagacggctgagggttgtccacaggtcattgaacaggtataggaaacgttccgccgtaaccatcagttggcggatattgtggtggttgtacagcagcccgcaattttccctcagcaggccttcgtaggcaccgggagtgatgccgttccattcgttgaagtatttcagcaggtcctccttgtcttccttgtccatgaaactcaggcatacatacaggcggtgagccaatgtggagaatacattcaggaagtgtagcggtgaatagtattgcccctcgttgcggaaggagaagtagatatcggatatgaacagcatgacatggcggcacagcataccgatgttggtggccaggctggtctgtttttctgcattctccactttggcaaggatgtcaaacgaagctttttctatggaatccacgagttgcccgaatttggtatagtagcctttcaggtccggatggctggacatgcttgtgcatggcgggatgaagtttccgtccacttcacagcggtttccgttcttgcgcaggcggccgatcagcagaaagtgtcttcccagctcgcttccgtcggtctgtccgctcggcagcacgctcaacgcatatttgggtaaggcattgggctggcgtggactgatttccttctcgttcggaatacccgaaggaagatgctcgaaagggtctgccatcagtatgacatcccaccgcttgtccttttcttcttcctcttctgtagggatatggaaactggcggtgagttcgtcatcctcaccggcatcataatctatcaggtaacctccggaagtaagggcgtggcaacgtttcaatcggacttccaaggtgcctgtaacgagttccgtaatgctgaaatcgccggaaaccggttctcctttcttgaatggcaggagtccgtaggtattgcggttcagatgaaacgactggtattcgcacaaccggtccgtaaagtggtcttcctgttgggtgaaatgccctttgttgacgggcattccgtccgcccagtttaccagcggatattttttcttttggctctgttttcctatcataatgtttctatttaatattcgttatactttataagttcgtttgccacacgcttggctatgattacatcgtgtcttttcagcttgttgccggcaagtgtaacgtcggggtctatatagcgccgtctcttgaaaaaggacggtttggtatagaatacccattcgtaataggctcctccttcattcttatatacgatgggcgaagacggtgatttgaggttgcagtcgtcaatcatgcgctggaaccactgcccgaagatgacatcctcggatgccttgccggttatgcgttccgatgcggggtcatccaccctgcggaatatgtccacatccattacgatgctccgttcacggttgatgtacaaggtatccgagtcatattcctccgaatatttccatactttataaatttcaatgggtatgtcgaaatagctgttcaccgtttgggaatacaggagtggaaatgcaaagggcagcaggcaggtggaggcccagatgccgtactggagttcgttgcagaggttgaacactacggaaaagagtccggctcccagaagcatgaccgtaaccgtcagcaggcattggatgccgaaagaaggcatttccttgcttgacgcgaacactttgcgaaggatgagccggttgtaatatccggcagtccagtacaggatgaccagcaggatgtaggcataaggcatgaagttatagtccatgaatccggacaggccgggcagggcaaggattatgccgcacagcagcagatacgcaatcagttttttgttgttgagcagtttgttcttgcgtgcgataaaataggccgcgattccgaaaatcacggtcagcagcggcatcagcaggtacgatgaaatgagatgttgggtaactgggttcataagtatggtatttatgctttattgtattctatgaatatccggtagttgaatgtgtccggcgaacaggccgagagtttggtacgcagattgtcttttatctgtttttcctgcgaaggctcatccagtttcgttccaagaatcagatggacttctttggttcggatcagtccttcgtgcggcatcgggctgatttccaccccgttccggatttctgtccgcaccagcagttctccgagttcttttttgcagaagctggctatgtcgttctgtgtcaggacacggccgtgcgaaatgaaggcgtatttgtagatgtcaatccgttctctgttttggggggcttgtttcccgccgtaggtggtactgaccagagccagtgtcttcgggtccaggtaagtggtggcattgggggacaggtttacgcctgcctgtatccggtttcctacctcacagttggttgtccagtatttgacggtaatctgccccttgccggacaattcgtcaatcataaggtaataaggtgtttccctgaactcgttcatgttgtccgctgtctgtttcatttgcgccatcagctgctccatctggatggtaagtgcctgtagcttgatgcttgatacggcattgaaggcatgggtctcgtcatccagcaggtcggacagatagccgagcagctccttggcggaacgggagtcgaaacgctcgcatcctcctttgcggatggagtaggttccatagctttccgtggaatcctttgcggaatagaggagttcatggtagttctttccgtcagaatccttcacgctgtgtacggacagaagggattcgtagctgcccgtgcgcaagggtatcaccctgaaagtttcctcaagggtggtcgtctgttcgtgaagcgtcttgttctctacaggcacgatgttgatgccggcatgaagttcttcaaggacttccgttgtgaaatgggcggggaactgtatcttcacccataccagcttgtcctgcatcttctccagaacggcctctttgaaacaggaccgcagggtgtccggaaggtttttcctgcaggaaccgtcgagtggaaaggactgcgataccttcagaaaatgtttgctgtaaatatccatgacttccttgtctatgacggacattacgtcatagtcttggaaaaaggcacgggttggttctttctgtatggttgtcttttcatggattcccccttccatcacgactgtcttcccttctacggaccattccgtacaggggagcaggagcagatattcatagctctccgtaaggttgggaaaatctagatagaacgaaaagtcttcaaggtcggaaatggattcatccaccgccattcctaaccagacggtacgcggagacatccttgtctctgcacgggcaatcatggtcttctccaaggtaggggctatccggtagagaaggtcgtcgcagaccatatatttcacgtcggctttgtgcagcagggtatcgcaggcgggataaaacgatacgcttccggtcgatagcttccgggtaagcgagtcgctctcgtaatacatgcccgattcccgggttatcaggtaacacggttctatgggataggcgtgtacgatgccgtgtgcgggaaagggtgaggtaaggatgtccggggtaaggattcgggcggtcttttccagcagccttgtctcgatggcggtaaaatcctctcccagcatatatatctcgttggacaatgcttccagcaggagcttgacaaccgggtcgaagttttccgccttttttattccccagaaagccgcagcgtatttcagcatacggtttctgatttgctctttattgtatttttctgtactcataatcctttcatcgggttgaaatcggtcctaaatagattacataatagaaacaccgtttttctccggtatgtaccagggttccatatacatatacttgtacacgtttctttacggcgggagcatcaaatacattgtcctgtcgggtggtgtcatcaatgatgacacgtacatttacacccgtaagccgcttctcgtgccgggtaattgccttggttatgtattccgagaattgtccttcccaacgggtgtgtgagacaatgctttcaaagtcgagaaaaaagatctcacagccgaactccttgtcaaaggcatgttcgccgggagccgtactgatcagcagttcgataaactggtcgatggactcgatttccgagcaggatgcaagacggctgttttccacatcctcgctgagcaaggcttcaaaatccaggggcaatttgcaaaactttgtttccatacttgtcagtgccattcgttttcaaattcttcgtctatgaattttagtgttcttgcggcaaacagaaggacgatgctgctggaattggagatacggtcaaccttgcgttgcagacggatgcagttcccttccacaaagcgcaaggcaaatgccgcttgttggtcgggttgctccttcaggtagatccgtatttcgccgtcttcatgggagtggctgtatgcggcccatctcaacagctcgtcacccggcatcccgctgagggtacaggtgacgaatccgccgtatgcctcaccttcaggcaatccgtcacggtctgtattccgcttgaattgcaggtcgaactcttcaatgctgtatgtctcatggcagacggacagccgcatcacgtagcggtcatccggcattgaggattttttgtttctgaacaatgaagtgaaccagttcatgattataagtttaagtgacacgaatcgccggtctccatttcccggaagtggatgaatagtgaggtacggctctctttggttgttgaatgcacattgaaatcaaggcattttgctcccttgaaacggatgatctctttgggagtaccgggcaggccggaagtgttcatcacctctccgtccttcaggattcttgaattgaacatccattccaagagttcctctgtaggaaatccggcaatgcttacccgtattttaccgccgtaggtcttcccggttacctttccgttaggagtggtttctttccggaagtcatactcgtagcccagcaggtcgtatgcctgcacttcttcatgctccgagggttcggctgtccagaacttgatatacgattgtgcactcatatccttatgttattttattcttcttcactcatcagattggtttgcagcatggcggtcagggtccgttcctcgttcatgcgtgattcaacgaacagtaccgtgtcttggctgtccagatgcttgcgtacataggctcgcaggtaggctttgaatgcctgtacctttgtccggtattcctctaagggaagggcaaagatatcttgcgtcccgacccgttccagaccgtatctctccagttcttcttcaaatgacttttttgattgatcattggagattgtataaattattaataccttatactctttcataaacaatgaaattaaaaaaataaatagggtgtccagtttgatgttccagcttttagttcaaaaaagatatgatgcaagttccaaagtgctgataatcatatctctttaaaatatattgattcaatgaattagctatgcttttttgtatgttaaaattgtacctaaaaacaatagtgttatagttaataatcaatatcttaagttgttaaatcaataccaaaaacgagagcgtagaactggacaccctaaaaaataaagcaaatcctaataatacaataaaaggagtaaatatgaaaagatatgcccatacattagaactatgttcataaatttttctttccataattcgttcatttctatgtttataccgataataaaaatagagactactccataataaaatcataataatgaaaaccaccaaaaacacattacttggatttttttgtggtgaatatcccattataatataatagtatataattgcaatatctgccaaatagaataataagactgtagacataataaatggaacatgtatatttaaatacatacttgtgtccatatatcgagtcaatacttgaattttataaaacaaatattctaagattttatgcataactttattcattaaaatatccaaagccatctgtagctgtatccaccaaatagtaaatagaactaatagcaaatccccatggtcccaatatacctatataggtaaatcccacatctaatgctgctttaacaaatttcttttccaatgttcttccatcttctacaaatattaaggaaacagaataaccagcagaagcatacgaactccagtttccaagcattttcataccttttaaatatttagtcccggtttttccaattgcttgagcctctttaagtaactgctgctttttatcgagtgaattaaactgcttccaagaataaccatgaaaacttcttattccataatctattatttcagttttcgcacctaacccaataccaaaagctccaattcctgtattaatattatcaagaatttccttattaaagcccactccatctgtaatgtcaaaatcttgtttaattcctttctcatgtatataagaacgaatcgtttttgaatcactcaaaagaatatttccttttgaatctgtagcttctatataaataaaataattaccaccttcctgattcaaatacacattaaccttaccttgttcttttggaaaagttacagaccggtttcccacagcaacagttatggttccattaccattatcataagttattctttcaattatatcttcagtagtgtatcccatgctcaaaaagatgcgctctggactatcatctatagcttgataaaaaagagggtgtaactcacaactgctccattgcacattaccatctgtaatcctgaaagcctgtgctggcatatacacaggacaggtatatccaatacccttgacataacctgtatatggaactcctattgattttagaaactcaaaatcctctagagttattattctattattcagaatatcgcccattactttacccaccgattatcaaattcaataccattcacgcttacactctctggagatagaatcagacttgttgacaatccttgtcccaaagcctctataacccgtctcagattgacacaatatgcattcgtaaacgccacctcaaacacgattccggacgttccagtcttgaacagaactgccccgttctttttcacccacggtttcacagcccatccgtagatgttgcttttcaccgtctgcgaaagggttatcatgattcgtcctccacgcacttcgccttccggttggttctttaggttatctactggctggtgaaaacctattttgaactgttccactgcatattcgtcgccgtcaacgctgaatatgacattcacgttgctgtccacttgcggaaaattaaaaagtcccataacgctgctgtttttaaaacacccactgattttcaaactcttctgtaccgaatgccagtttctgtgcctgtacggtcagtttggtcgcaatatagcttttgccctgccggatatagctgatttccatatccacacaggtcgctttctcaaagagtatcttttcgagtgtggagccttggttgtcatggactacgatggctccgctctggtatttacgggcatccagcatccactggatcatgtcacggttgggaagatgagggtaggttacataaaacgtgccgccttttacctcggtctgtgcctgtcctttgatatctatcccttgggcaaatccgaattcgcaaccgatgagctggtagctgtccttgtacatgtcggtcagtgaggaggcagccaggttgcctatctttaagaatacggtatatccaaacatagtgtacttgattattggtgaatattccaggttaattcattctgttcgtccagacctacctccagactttttcctttgcccagctcctcgttgatgataagccgtgaaatcggtctgcgcagatagttacggattacaccggccacttggcgggcaccgtatttgggtgtgaatcctttgtgtgcaagcatcttacgggcatcatcggtgatggttatgccgataccctgcttgtccagaagttttctgactccgttgaactgtatgtcgaatattttcaggagtatgtcttcgcggatgggggagaacggaacgatttcagacaggcgtgccagaaactccggacggaaatactgccccatcacctccatgatctgggtggtggacggaacattgccggactcaagttgcttggtcagccactcgcttcctacattggatgtgaacagcacgatggagttggagaaatccccttccttgcccagacggtcatgcagttttccctcgtccatgatttgcaggaaaatgtcatatacggacgggtgcgctttctctatttcatcaaaaaggacaacggcgtatggctgttgccgtattttattgaccagcatgccgccttcctcatatcccacatatcccggaggcgctccgtacagcagggcggcggagtgttcttccttgaactcggacatgtcgaaacggatcatggatttctcgtcattgaacagggcttccgccagtgctttggcaagttcggtcttgccggtaccggtgggtcccagcaggaagaaggagccgatgggctgtcccggcttgttcatgccgctacgggattccaggatggcatccgtcaatgtcttcagggcctggtcctgtccgacgacgcgtcgcctcagataatcttccatattgagtagccgttccttttcctgcgactgtatcttgccgatagggatgcctgtcttgctggcgacaacggcggctacctcatagatacccacctcctctattttcttctctgcaaattggaggaggacgttcaatgcgtttctcagatagccggtcagttcttcatactcctgcaattcatggatatccgcttcatcgggtatgactcctaaaaggatggggcttaatttgttgtgcattacgaaaagcagcgttttcagttcttcggtcttttcctgaaggtccttttcgtccttttctatttcatccagcccggatagcagggtctccacattcttctttcctgtttcattgaccatcttgatggcggagagcgtcatgtccagcagaccgatggcggaatcaggcagacggcggtctttgatataccgtttggcaagacggacacattcggctacggcttcgttgctgattcttacatgatggtagtccacgtattgtttctgcacggagtgtagcatctggatagcggactttatgtccggttcgcttacctgtatgacctcgaaacggcggctgaaagcatggtccggctcgatgattttgcggtattcgtcaatggtggtggcgccgatgacggtcaggtcgccgtgcgacagttcggatttcaatacatttcccgcaccggtatttccttgtcggttgtccagcaatacatggatttcgtcaataaacaggattgcattgtcgatattccgcaattctttcaggatgtttttcaggcggtcctcgatttcccccttgtaggtggctcccgcaatcagggaggcgttgtccagttcaaatacacgggtttcttccagaaacgagggcactttatggctgactatctcccaggcaagtccgtaaaccagtgctgtctttcctactccggcatcaccgacaatcaggacattggacttgctccggcttcccagtatctccatgaccatacggttttcacggtcgcggttgatgaccggatgcagcttgttggccgcatcttcggttagatccacacagtatttgcccaagaaggaggatgaggcggaagtcggggcataggacttctccgtagtggcagaaggacatgccggctgcccgttacctatatatatggaatggatatccttttccagaatggggaaagacctgagctggtcgctggaaaaagcgacaccgggctttgccagtgccaatagcacacagatgggattgatgtcgaacagcccgaactggattcgtgcatcgtctgcggcacggaaaacggcgtcaatccgttccgaaggcttgatttcggacaactgggtggatttcgggcattgttcgatatacacgtccgcccattcctccagatagcctaaatccttgcctatacttattataaaatctcttaaccctacatctttatgaagtagagccttcaacaaatgcgagggtgtataacactcgttcgcattttcacgagccactgcaagtgctatgttaagcgcaatttttacagaatcatcaagattgatgaaaccaactcctgtttccataatcgtaagatttaaaaattgcgcaggagaacattgcaaatataaggcaaaaaaaataattcggctattgttggcagtgttttttttatgcttatgggcatattttcggcaaaaacaagaaaaaatcatcaaaagttctttgtagttttcagaaaatgccatatattgggcgcagaaattgaaggacaaagataggactgtagcaggcctcctttgaccggatatttcaaaatcaacttattttttaatttaaaactttgagaatatggcatttaaagcgtcatttaagttttcggactcaagagagtttgatgtactgacctggagagttaagttcaatcgtgatgtggaccccaaaggccgtccggcatctgacatttatggtggcacaatctatgtggaaatcgaatcaactcccgataccattgtgctggataagatgttcaagcagtaccagcccgtaaacggaaacatcgtcttcaagaaagcggatgaagatgccaaaatgaaggaattggtgttcgaaaatggttatgtggtggattacgaagaggcactgaatgtggctaacccttatccgatgacaatcaagttcgccatttctgcacagaccgtgaagatggacgaggctacatttgtacaggattggccggaaaacaactaatggttgtttcctaatcaaagttttaaggtgccggaatataccaattccggttatttcggcaccaaaaaacataccgaccagtcggattatttatttaaaatcatagtttaagatagtatgggagcaagttttctgaatttggtggctactaaagtaaccgtgaaaggagaagaacagaaattcgtttcactgcatctccgtcagggtttcaaccggcatcacaccttcactgtggtggtgaattatctgtcgcctaacaatacgttccaacagaccccggaaaaattcatcggctacatcggggagacagccagcatttcatttgtccataggcagacgggtgaaagttatgacttcgagggaatcatcactcaagtggaaatggttggaagcatgggcgagacaggcggagtggccattcacggaacaagccctacgatactgtatgagaacaacaggacactcgattcttggatggatcagtccctctctaccataataaaggaggtgacgcaggagtatggaaaggtcaatttggtttccaatcccaagtatgcggcgcccataccctacatggcgcagtataacgagagtgtctttgactttatgaatcgcctttcggctctttatggggagtggttctattatgacgggacgaaagtgtatttcggcaagcctgacagggacaatacggagaagattgtttatgacatggatttggaggaggtacgtctggttgccaatctggtaccgggtaaatccgcaagatacgattatgtagcgcaggagaacaaacagcataatgcggatacgcctgccaaaccggatggcatgaacgaccttcagtctattgcacacagctgctctgagaaggcatatactgcaaaaacgacctcggctgccgacccccatgtaacggacaaggcggaactggacgaacagatgaggattgtaaagaatgcgtctggtgccaatcttctgaacatcaaaggcataggaaagacttgccggataaggattggtgaaatcatcgatgtttctttccctgacaggatgaaactgcctcctttaggcaagttccgtattgtcgggattgagcatgaggtacgccgtgacggacattactccaatagttttgtcggtgtgccggacggtacggtacatattcctgttcccgatgtgaagcgaccgttggcgttgccggaactggctacggtgaaggaaaacaacgacgacaagggacagggacgtgtgaaagtggctttcgactggcagaaaaacggcaagacaaccaattggatcagggtgcagactcctaatgcgggagtaagtggtgcggtttccaagaatcgcggatgggtatttgttccggaagtcggcgatcaggttatggtaagctacgagcatggcaacccggaccgcccctatgttacgggatcggtgttccattccggttcaggtaaaggaggggacaaggacaacaaggtcaagagcattatcacacgcagcggcaatgccatcgttttcgacgatgagacgggaagcatcgttattaccgaccagacgggaaaacagctgatcatattggatggcacggatgccattaccgtcatggcgaaaagaagcattacccttaccaacgaggcggaatcggtcatcgtaatggatgataagtcgataggcttgcaggccgataccattgctctcgaaggcaggaaaagtgtaacattgctgtccggcaacgaatgtatggtgctcagcagcgaaaagagtataattagcagcagcggtaccaatatcaaacaggaggcggcaaaggattacgatgttgctgcaaagaacggaacggtcaacggtgtaaatctgatgatagagggaaagggaaacgtaacggtttcgggaggaatagtaaagtttaactcataattcggttggctatgggagcatctgcatctgtgatacaggaatattacaaagcagtcgattactgggcggacatagtcggcaacagggactggaaactgtctgtatggattgtcgggcagaatgatgtggacttggtggacaggtttctggaaatagaacgttctccggtagggcagttcgatgacatattctttcgttttgatacgccgtacaggggggatgacgaggaatacactgaacagctctggcaggaatatgcgggttggttttcagaaaaggttgaggagaagtatgatattctcagggctctgaggcacgacgggctgctgaaggaagaatacattcctgatgtgtcggttgagcatacggcgggcaacttgtggagagagatgttgcgtttcaaggcatgtatctcccggttggatgatgcctttttctgtctgtactttcctccggaacaggaaagggggtattcccggacaggatggttcggcaatgtgctgaaagaaggtgtcccgcagggaatccggatgacaaccattgacttgaaaaagaacaggagtatccggctgggtgagtctcgggaagtggtttgcatacgcccgcagttcgatatggcggcggctttgcataaccggatggcacggtcggatagcggtaacgacctgattgcacctgaaaatcggttcaagcagcaggttacggttgtcatggattctacacaaaagcaggattggaaattattggacagagaaatccgaaaactgttggatattgcacaggaaataaaggatacgaatatccggatttccgctctgcttatcgcatccgaggcatgttatgctatcagggaatataagcatagcatgaaatacagcgacgaaaccgtccgggaggcggaaaaggcgatgcagggcggtgaaacggcaggatatagttattggaaaatggctgtttccatgaaagcggccattctgacagccgggaaaaaacgggaggaagcggttgccttgtatgacatgatggctaaaaaagccgtcatgcaaaaggacccttattatgtcatggaaggctatcgcatgtgtggtttcctgcgctatgaggatggaaagatggaacaggctttcgaatattttttgcttgccctggcaggaggcagctacctttctgccgaaatcaggcggagttccacgttcgtttatgcggcgtatctggctcttcatacaggaaggctggttcgtgctccgattgatgtcgggatattggaacggcagctctgcgaatggattggggaggattggaaggaactggtggacaatccggatatgcagcaggcgaaggccagaagaaggggaagttttttcagttgagcgagatttaattaatatatattttaaatttaaaattgaataagtatggatcttggtaattatggaatcggcggaaacgaagtgaagattgacgcttccgaaggtattgcggaaattccacaaaatcgaaccttattggtggaacagctgacgaaggatgagccggtggctcccgaagtggttgccggtctgaccaacattgacgaagtctttgcacatttccggccggaaatagatatcgagttcgcggatgcggacggtgctcccgtagaggaaaatttccgtttccacaatgtcggtgatttttctgtcaggaaaatgacggaacagagttcattcttgtccggcctgaatgcggaaaagcagtttgcggacaggatggagaagtcgttgcgttccaacaaggtgctgcaacgggtgctggaaaatccggagacacgtggagcgtttgtcaatgcgatttctgccattttggacgatttgaagaacaatgagaagtctaaccccactaatgaatgatagttatgagcgaacagaatacacaaagagaagcagccgtacagcagcaacaggctgtggcgcagtccagaaatctgaacgctgaattgcagattctggctaagtttggcggtttcaatgtcttggaatcttccgtggacggcatacagaacatgaatccggagcgcaaggcacggcggaacatattcctttccgaccccgaacgggcggctgagcgcaaggaactggaaaaacggcttgagatgtgggtcgatatgttgaaaggcaacaaatccatcagcgagatggtggaactgtgccagaagaagtctgcggcggtgtccggtctgctatcccagaaccagctgaaagcggtggaagaggtcaggcagttggagaagtcctaccgcacggtcatgctcttctacaagaatacggattccgacaagatcaagaatatctccattgtgaacgcttcgatgagccagcttaccgatttggacaactccttctttatcgatgccattgctaacgagcttcgtgcgaattatgaccgtttggacttgcgtaccaactattccctgctggttatcccgggatatttgggttccaacaaggttgttgaaaaatgggcaaagattgcgcatgacaacaaggtgatgatttacacggatttcgctgatctggaaaaaccggatgatgtcattgaaatgttctttgattccaatctttcgggaggcgatgtgtacaagtccaacgtatgtatgacctgcaactatctggtaggacggggacgctatgcggaactgggcgaaaccgaagacttgctgattcctccttctgcggcattggccggcagtgtgtacaagacggtaatggcacaggttaccgccggtaagaagtatggttccatgagcgaggtggacggggttgctttcaacctgaaaaaaagcgagatttccgaaatcgagaagattggcctgattccgatggtgaaggaatacggcaaggtgatggctttctctgccaagacattgttcaacggggacaacttgggattgcagacctattccgtagtccgtgtgttcgattgggtaacgaaagtgctgatggatttcctcaaccgccgtgcctttgagaactggaacagcaaggcggaaagggatttgcgtggtcagatcagcaagtttttggatagcatacagggtcccggacgcttgattgagaaattcaagattcttcgtttcgagcgcgatccgaagcagaaagaccgtattttcctcgacattcacctgactccttatttcccggcaaagagttttgtcatcaagttggaaggtacaaaaggggatgacgagaacgactggaacagcgactatgcacaggatgcataggtaagtccttacagggacagccggagtgtgccggttggaacacccggttgtctctttttcacattctaaaaaattctcaccatgtcagatgtgttcaagaatatagctgacgccgccggtagcagcagcgtcagacggggctttgccgaccttttttcagcctccaaggcggctttggacgagattcaggcgggtctgggcggaatccttccttccatgccgggtatgcctgtcgccaagttcggcgacctgtccatcgggatagacatgcatcctaccgttacccctccctctcccatcatgcctgtgcctcatgtaggcaaggtgtacgacctcatggcagacctcatggccggcatggcggctgccatgccgcctgcggctgatggagtggccggagtggcgtgcaacatcctcaagagcatggctccgtcggtcaaggtgcataaccagtggattgcgcaggcaggtatcggcatcgtgcatctgccggcatttgtattgcatccggccccgttggtcagcggtatgtccgagtccgagatgtggatgggcagttccactgtcctggcggacggtgcgccctgttcctccctcacacatccggcactctcatgcaacattgtgggaataccgacgattccccgcaaggggaagcccaggaaggtgagcaaggccctgcttgcccccacttccatgctctccaccatcacatccgtaggaaatcccgtgcttgtgggaggaccgcctaccattgatgtatttgcgctggcgatgaagttcggactgaaaggcttgggcaagatgtggaagaagataggcgaccgcttccaaaacctaatcgacaggctgaggaaaaaaggcatgaacaggctggcggacattctccagcccatcaagtgcaagactttcggcgagccggtggacgctgctacgggcagggtctatcacaccaatgtggactttgagcttccggggccgattcccgtcgtatgggaacgtacctattacagtgatgccgccgtggacggtccgttgggatacaactggcaccacagctacaatctgggaatacggcagctggaggaaggggcgttcgcattccgccatgctgacggacgggagtctttcctgcccgtactgaaacccggagattcctattttgaccgcaaggaacagttgtcttggacactcgatggccggggttacctgcttacggacatccgggggttgcaataccgttttgacggtcctgaaaaccgctccggttaccgcatggtatcgggcatttccacgaaggacggattccggctccgcttcgaatacgcttcggggggaaggctggcaggaatcatatcctcacggggagaattcctgaaagtggaaaccgacgagtcggggcgggtgctctgcgtttccgtaaatcaggacggtgaggaggtgaagctggtccgctaccgttacgatgaccggggcgacatggtggaaaccattgacgcgctggatgtcagcaaacatttcgtctattccggcggacacctgctggtacagcttaccaaccaagggggtatgtccttccattgggaatacgagggtaagggtgagaatgcccgctgtgtgcatacatggggcgatggaggcgtgatggaatatttcatccgttacggcaagggatatacccatattcgtaacggggaaaatgccgaaaccgaatattattacggtgaggacaaactcatctacaagatagtggatgccaacggaggaattacccgtcaccaatacaacagctttcaggagttggaggtcacggtcaatcccgaaggctatacccgtaagactgcctacaacgagttcggccagccggtccggattacggacgagaacggggaggacaccttcctggactacgacggcaatcgcaacctcgtctcgctctacactccgggtggaaaaaggctttcatgggactatgacggacaggatcgggtcgtcagccggaccacaccgggcggagagactgtgaaatatgcctacgagggaggcgtgctgcgcaccataacggacgggcagggacgggtttacacgctcacgttcaacgacaggtacgatctggaactgatgcagttccccaacggactgttccgccggtgggagtacgacggcaggggaaggcttgtacaggcggtggatgtgaaaggcaatgttacccgttatgcctacgaccgtgcggacaacctgatacggctggaagagccggacggcaacgtgcaccggtttgagtacgatgccatggggaacatggtacatgccagcgacaacatccgcgaggtcaggttcacctatggggcactgggggtactgaaaagccgcgagcaggaacggcaccacatcaccttcggctacaacagcgagttgcagctccggcgcatcggcaacgaggcgggcgacaactatttcttcgagctggacgggctgggacaggtcgttgcggaaaccggcttcgacggtctgcggcgtgagtacgagcgcgacggggcgggtcgtgtcacccgtgtgaaccgtcccggaggaaaatggacggaataccagtatgatggactggacaatatcctgaaggaggaacagtatgacggggaagtctccctctacacgtatgacaaggacggcatgctcgtcaaggcgaagaacagcgagaacctgctggagttcacccgtgacaggaagacgggactggttacagaggaaaggcagggagaatacactgtcagccgcacctatgacagcgaaggcaactgcacccgcatcaccagcagtctgggagcggacatccgccatacctatgaccgggaaggcaacctgcagaccatgcaggcaggtgaaagctggcaggcatcctgggtacgtgacaataccgggctggaggtgcagcgaagtttctccggcggtgtgactgtcaagacggaacgcgactgtttcggcagggagatacgcaagtcggtacggtcaggcggcatagagaaaggggcttaccgctaccaatggggaatcgccaaccgcctgctctccaaggaaaacgagctgacgggaacggtcattcgctacgactatgaccgtttcgacttccttatccggcaggaaaccacccaaggttcggaaacggatgtgatttaccgtgtgccggacttcgtgggtaacctctttgagacaccggataagaaagaccgcaaatacggtgccgggggaaaacttttggaagacccggattgtttctatcactacgatgatgaggggaacctcattttcagagagttcaagcatttgcaggaaacgggtgtaaggttcgaccgcaaacgtatggagaaggaacggggtatccattttctggcaacgggaacgggatggctttacgaatgggcttccaacggcatgctgaagaaggtcatacgtccggacggaaggccggtggaattccggtatgatgcgttggggcgccgcacggcaaagcaatacttcgggaaggtcacacgttggatatgggatggaaacgtgcctatacatgaatggagatacaaaactacagaaatacaaccagatgaaaaaggagaatcctttcagaaagagccgattgaaaacattaccacttgggtatttgaagaaggaacttttgttcctacagctaagatacaagaaggtaaacaatattccattgtgtccgactacttgggtacccccatccaaatgtacgacgaacaaggaaacaagacatgggactgtacactggatatctatggaaaagtgcttgccattgataagggaacagaatttgattgtcctttccgctatcaagggcagtatgtggataaagaaactaaattatgctacaaccgctttaggtactacgaaccagaaattggtaattatataagtcaagaccctattggactaagtgcaggtgaaagattttatagctatgtcaaaaatgtcaatctttgtattgatatttttggacttgtagccaaagaatttgacatcgatacttatggcaatattagcagtagggcgaatattggtgacaatttaacagcacacgaactccttcaacacgcatggcttgaacagaacaataaacttcccacaagtaaaaatagaggagttgatttaatttctaaagaaaacccttctattgcattaagagaaaagggtatacacaatagaattaccgctcttcaaaatagatatgggatgaaaggtaaaaacttgaaaggacaatctgcactagaaaatataaacaaaaatgcagctttaacacgtagaggaataatggaagggttaatagctgatggcatggatagaaaaactgcgaaagaaaaagcaaccgcattagtcgagaaactcagacaggatgcaatagcacatgctaaagcaaataatttaataacatgtaaatcataaaatagttatgaacataaaaaagatattaaagactagagaagacgctttatattatgatatatgtgaatataaagaaaactgtaatagttgggttgggggtaatgctcctaaaatattagataatatttctttccctaatatggaaaaatattatttctacttaaccctgcaaagcccattaaataaagaaagacaatactctatttttactccagattttgatacttccttagaatacaattcatatcctaattgcaaagtattactaattgaacatgaaataagcgaacagagtaattgtactaaatttaaacatcccgaaattgatgatatttattccttatatgaaataggagaagacagagatgggccagaaaaaaataatgttatcaaatttggaggaaaagctataccaatacaatggggattggataatgatggaaaagtaacaaaagatggatatgatttcatttttcaaatcaacgaaattggaatgagaggcatctcagaatttatgagtggaagtatatatgtatatggtaaaatagaaaatgaaaatattgaaaatctttttgttgcatattgggagtattcttaattttttagtacaatagcaggtagtatcaaaacaaatgtattacatattaattattggaacactacctttattgttaagttacaagacccgtcccggcggattataaatccgccggttataagtattaggatttgtaattcttgaatttccgactgaaagtatatggagataagcaagatgccaatcttataaatttgcacagctttctatttttataaaaataaggccaaggggctataaacattatccaacatcgcttagctcatggtccaaatcaaacctcaacacataaaaaacaccattctccacatagccgaaacacctgttccgctgagtgattctgaactttttaatgcctttcttccataggtcatccgaaaaatagcgcttgcttttcttgttcttgttatacggtttataatccaatccattatctgtagcaatggcactccagtccaactcctcaaatttatggaatgaatcaataaattcgttctgattctcgccgtcaataagggaaaaacccagcgtgtcatcaataaggctgaaatcaagcttgcctccactgaaacgaatggtaatatacttttcgagagatagttcacccctttcaaacaagatagagtacaattgcttctctttccagatattaccaacctcgattggttcttcatctttggttacggcaaccagatgcttctcatacctggatctaataaatgatagaagacaaaccgagcgggctgctgcttcggcaactgaactgccggatacatcggtttcacctactgaatattgggcattggaatcctgttggggagcttcatcccaaaacggattacagatggcacgtgccaatgtacttttatacagcctggcttcatcgatgatacgggtttccggtgctgtcagcaaatcgtgtaaagtcttgtcgggagtggcttgcgcagcaaaaaaacttccttgtttgaacagatatcccactccatgtgaaagggcatcctgcaatgccttgtgaaacggaggcattccgtttttccagaaatcccggctgtccaaaaactgtccgttcaatgacaattcattgataatgataccgtccatagagtcttatagctttaaaatggcatccaaatcaatatcaaactgctcaaacatgccgggaatataggattggattcctccctgtggggtaaattccacaggttcggcatgggtcaatccattcccgtcttgtctgaagttgtacacggcaacgtcagacaaggccaacttttcctgactgatcaggcgccggataccgttaaacaggtggtcgctatggctctctatgatgatttgcacaccggctttcgctatctttgccatgaaatcaatcaggtcggcttgtgccttggggtgcagatggatttctggattctccgtaatcaccatgccgcctttcggggtcgcgaaacaagctatgatgacttccgtcataaagcttactccggtaccgacatggtaagggagaagctgtttgccgctgcgcgtttcatattttacgtaatgattgcttcctactgtttccaccaccagccggtaaccggtcagcctgtccagttgataattcacctgaccttccagggtttgagtgccgggagccaggatcaatgcggcatccagcgtatccagacggtgcttggcgtaatagtctatcacaaattccccgttacgccccagcttgttttccgaatcgggattaacgggatgcatatatgccccaccggggcgtgtggcaggcaggtacagcaggttctcgcttccgagaactcccagcaggttcggagatgcgtcagccgattgttccacaaaagtggtttggaatgagtcatcgcccggagtaaaacaaagccgggtcggatcttctccatgatacgaaatacagatttcgtatgacttggcattggtcacaaagttccttacatcattgaaattcgacgcttctgttctccggttcttcagaccgtgtttgcctttttgctccgtcacgttatccgaagcaatcagcaaggcttgcagggcggtagattttcccgatgaattcggacctgcgaacaggttcagaggttttaattccaacgaacattccaccaggcatttataattgttgacagtcagattgtttagcataaattcagttcatgaataagtcggttgataatttcataacgcttataggtctgctttccgctatccacggagcgtgtgagagaatccagataggcatcattgcacattaattgcatataagtatcctgaacctgacgatggaattgttccccttctccgttcaatcttgacagaagataactgaaactctcaaagaaagccatgtttatcggccgtttcttgccgggtaacgaaggcagcctgaagccgcctgacggaagcagttgtatggcaagctccatggcacgtgtaaaccggctatccagttctttaaacaaaccgttttccggctccagctgattgagaaaacgcatcgttttccccaaaaaatcctctacattgcttcggtaatccagaggctcatgggtgtccgggtctatggtgatatgctgctgccacaaataaaaagccgtaaaacggagtaccagatacctgtctttcatatggttgtctggaatggaaccttctgtagcttcaacgaatacctctttcttggccagccggttgatcagtttcgtggcattgccctgatagagcgcattgcgcatctcttgattgttaagccgcgtcccgccacggttcacccggtcaaacaagtcaaaggtaacccggtcactggtaggtgccttaatcacatgcaaggtaagcgaacagtcctctattttattctgctccaacggagtcaaatctgcgaatcgggaaccgttcttgtcctttaggatagtgagtttgtccaaggcaaattcattgttgataaaactgaacaaggtgctcagacgctgcttgccgtctacaataagatacactcccttctcatcttccttcacataaatcagaggtagaggaatacccatcagtatggattctatcagctcgcttttctgtttggtcttccataccagtccccgttgaaaatcaggggtcagattcagcatcggaggagttttttcccatttccgcttcagttggaacacggaagccgattcgcgggctatatttagcactgcgtccggatatacggtattcggctcgtatgtctgctggttggaagccgtccgtatggtatattctccttcaaagtccatttactctccttttttcttcaacagatgcaaatatacgacgtttttttgatacatgacttgaaatcaattgccttttatggattgtcttatgatttttgatagaaaatagtaggagaatgtttttcttttttgattttaaatgatacatttgcaaaaagcagaccgaccaatcggtttaaaaacaagaatcaaaaagtttcattatgccggatgtgttcaagaatatagctgacgccgccggtagcagcagcgtcagacggggctttgccgaccttttttcagcctccaaggcggctttggacgagattcaggcgggtctgggcggaatccttccttccatgccgggtatgcctgtcgccaagttcggcgacctgtccatcgggatagacatgcatcctaccgttacccctccctctcccatcatgcctgtgcctcatgtaggcaaggtgtacgacctcatggcagacctcatggccggcatggcggctgccatgccgcctgcggctgatggagtggccggagtggcgtgcaacatcctcaagagcatggctccgtcggtcaaggtgcataaccagtggattgcgcaggcaggtatcggcatcgtgcatctgccggcatttgtattgcatccggccccgttggtcagcggtatgtccgagtccgagatgtggatgggcagttccactgtcctggcggacggtgcgccctgttcctccctcacacatccggcactctcatgcaacattgtgggaataccgacgattccccgcaaggggaagcccaggaaggtgagcaaggccctgcttgcccccacttccatgctctccaccatcacatccgtaggaaatcccgtgcttgtgggaggaccgcctaccattgatgtgtttgcgctggcgatgaagctggggctgaaaggattgtcaaagctcgggaaaaaaatatcccatctgctgcatggattgatagacaaggcgggattgaatccccggcttgccaggattctcaagaaaacagcttgcatcatattcggtgagccggtggacgctgctacgggcagggtctatcacaccaatgtggacttcgagcttccgggtccgattcccgtcgtatgggaacgtacctattacagtgatgccgccgtggacggtccgttgggatacaattggcaccacagctacaatctgggaatacggcagttggaggaaggggcgttcgcattccgtcatgctgacggacgggagtccttcctgcctgcgctgaaacttggagaatcccattttgaccgcagggaacagctggcatggacactcgatggccggggttacatgcttacggacatccgggggttgcaataccgttttgacggtcccgaaaaccgctccggttaccgcatggtatcgggcatttccacgaaggacggattccggctccgcttcgaatacgcttcggggggaaggctggcaggaatcatatcctcacggggagaattcctgaaagtggaaaccgacgagtcggggcgggtgctctgcgtttccgtaaatcaggacggtgaggaggtgaagctggtccgctaccgttacgatgaccggggcgacatggtggaaaccattgacgcgctggatgtcagcaagcatttcgtctattccggcgggcacctgctggtacagcttaccaaccaagggggtatgtccttccattgggaatacgagggtaagggtgagaatgcccgctgtgtgcatacatggggcgatggaggcgtgatggaatatttcatccgttacggtaagggatatacccatatccgcaatggggaaaatgccgaaaccgaatattattacggtgaggacaaactcatctacaagatagtggatgccaacgggggaattacccgccgccagtacaacagctttcaggagctggaggtaacggtcaaccccgaaggctatacccgcaagacttcctacaacgagttcggactgccggtccggataacggacgagaacggggaggacaccttcctggactatgacaacaaccgcaacctggtctcgctctacactccgtgcggaaagaggctttcatgggactatgacggacaggatcgggtcgtcagccggaccacaccgggtggagaaactgtgaaatatgtctacgagggaggcgtgttgcgtaccataacggacggacagggccgggtttacacgctcacgttcaacgacaggtacgacctggagctgctgcagttccccaacgggctgttccgccggtgggagtacgacggcaggggaaggcttgtgcaggcggtggatgtgaaaggcaatgttacccgttatgcctacaatcgggcggacaacctgatacggctggaagaaccggacggcaacgtgcaccggtttgagtacgatgccatgggaaacatggtacatgccagcgacaacatccgcgaggtcaggttcacctatggggcgctgggggtgttgaaaagccgcgagcaggacaggcactggattacattcggctacaacagcgagttgcagctccggcgcatcggcaatgaggtgggcgacaactatttcttcgagctggacgggctgggacaggtcgttacggaaaccggcttcgacggtctgcggcgtgagtacgagcgcgacggcgcgggtcgtgtcacccgtgtgaaccgtcccggaggaaaatggacggaataccagtacgacggactggacaatatcctgaaggaggaacagtatgacggggaggtctccctctacacgtatgacaaggacggcatgctcgtcagggcgaaacacagcgagaacctgctggaattcacccgtgacaggaagacgggactggttacagaggaaaggcagggagaatacaccgtcagccgtacctatgacagcgaaggcaactgcacccgcatcaccagcagtctgggagcggacattcgtcacacttatgaccgggaaggcaacctgcagaccatgcaggcaggcgagagctggcaggcatcgtgggtgcgtgacaatacggggctggaggtgcagcgcaccttctccggtggcgtaaccgtcagcaccgagcgcgactgtttcgggcgcgaggtgcgcaagtccgtccgcgcgggcggcatcgagcgcggggcgtaccgctacgagtggggcgtcgctaatcggttgctcgccaaggagaacgagctgacgggaacggtcatgcgctacgactacgaccgtttcgacttccttatccggcaggaaaccatccagggctcggaaacggacgtgatttaccgcgtaccggacttcgtgggcaacctctttgagacaccggacaaaaaagaccgcaaatacggtcccgggggaaaactgttggaagacccggattgtttctatcactacgacgacgaaggaaacctcattttccgtgagttcaaacggttgcaggaaacgggcgtaaggtatgaccgcaagcgcatggagaaggagcgcggcgtccgctgtctggctacaggtacgggatggctctacgagtggagttccaatggtatgctaaagaaggttatacgtccggacggaagaccggtggagttccgttacgatgcgttgggaagacgcaccgccaaacagtatttcggaaaggtcacacgctgggtgtgggacggaaacgtacctttacacgaatggagctataaagccgttggcttacaatcggacgaagaggaaaacatccttccaaaagaaccggcagaagatgttaccacctgggtgttcgaagcaggcacgtttgtaccaacagcaaagatacaggatggtaagcaatattctattgtgtccgattatttgggtacacctattcagatgtacgatgaaaaaggaaacaaaacttgggattgtacactagatatttatggaaaagtgattactgtaaataaaggaatggagtttgattgtccattcaggtttcaagggcaatatgtggatgaggaatcgggattatactacaaccgttttaggtattatgaaccaagaattggtagttacatgagtcaagatcctataggattaaaatctggtattttagcaatatatagatatgttaattctactaacatagcacttgatattttaggcttatctcatgcttataaattaaaaaaagctatggaaaatgcctataggcctgttgctgctggacagactccacatcatattgttcaattgaatcggaataatgaatatgtaaacagatccaaagccgtattggaaaggtgtcacataggaattaatgatgccgaaaatggagttgctctatggggtactgctaattctcaagtaactcaatctggacatccaggaagagaagctgccagaactactggtacttaccatgcagggtacatacattcgcttgaaagtgataaacgaatatgtgaattattagagagtgctgagaaatatgcgatagacaataaattaagcgataatttaaaagacaattatgtcagaaaacaattacaaaaaattggaacagaaatagaaagtggaagatggaacaattcaacccattaattcataagtaatttatattaaatatcgacaattatgttaacagatttaaaattaaaaataacaagtttacaaaaaaagaataatattcttcttataaaagaatatttaaaaaatgtacatagatgggaatattcgaccaaggaatattataatctactaccttattatcatttacttaataaagaaaaaaaaggtagacttttaaaaaacatgaccattgaaaaatggaattatcaggacttgttcagatttggcttcgatgaaaataacaaaatgattatttcagagcaacatatagatgcagatatacgaaaaggtttatatatcagtttatatgaatattctaaacatggatataacaaaacctatttcaaatattacccaacagaaaatgaaaatacacccgtaattaatttaatatctatatcaaaatttgaaatagtaaataatgagaattcaatatatgttggagttaatatttatggtgatagttcaactatagaatacttttatgataataataaactcattaaagtcatcaaaacagcctcaagatggaaacataaagaagaatataacttgttttacaataaaaatgaagaactatacaaaattattttaggaaataccatttattggcaaaatcaaaaataaaacaaagcccccattaactcatctcacttagatatactatctttgtgacaagcaacaactaatatgttacaattcccaactgtttcatcagtatagctcaaaatgtccaaaaaaaattcaaccagttataaacgataacattatgaacatgaataatctaaaaggttttgtcttctatgtggatatactaggattttcagctttaacacaaggtaaaatccagcttacagaagacgattttaatatttggcaggtctctaaacattttcagacttcagggaatcaggaatttgcagccaatattttgatcatttttcggaaaatcttggcaaactgccagagtaaataccctacagtaaatttcacccagttgtccgattgcgctttcgtctggtctgaaaacatgaaagatgtcatactttcatgtcatactattatgtgggattgtttgcaaaatggtattctatgtcgtggtggtattgcatacggagatatcattgaagataacaacactaatttgggacaaatgttgctaggaaatgctgtaagtaaggctgtcaaattggaacaggctggggccaaaggctgccgtgttttaatggatcaggaggttccggcatttttacatgactatgattcatcatttttgagcaaaatttaccagttgttccaaccttttgagaatcccttggattaccaaatctatgatgaattcaaatggtattactcccaaagtctgaaagatttaaacacgactataggtataattcaggcaacagtcgaaagattatgcctcgctgcaaaattacaatatcatcccagatttaactggaatgtccggtctcaagagggtaatatccatgtaaaatcatccatgcgatttacttcagcaaatgaacagaatgtttttaatatagagcatacctttgattggaaagaaatggtagatttaaaaacacgaacagcaacaaattataaccgtatagctaaaaaaattcaaggggaagccttatcttgtaccatcgataaagaaggacgcataaagtttcctccagtaccatagcaactattgaacattttttatattatggacattttttctaaagaaattattatacctataacggcagccatactgggcattgccgttcccttgttaattggagttattcagcggatagacgataagtatgaatctacccgcctgatacaactctttatgaacgaaagaagcacaaagcattttcttggcttgctcgctattaccatatttttactgttctatcaattggtcgctccacctaactattttgatttcggagttcttacaaagtacatagattattctgccattattctcgcgacaatattctgtgtactgctaacattcagtatatttatgattttcaggcttatctatatctataatgtacctgaaaagctgcaaaagcatttgataaaaagaaacaatatcccacaagataccagaaaagcgtggttcgaactttttattgccatgctcaaacagaacaatgtggatgtattgcgcgattgctatcaggaattgtatgactggatcatatctttacgtgcaggtaaacaatggacgttaatggaatatccgccggagttatacgaaggcattgtctccattaatgagcagctgtgcatgcaacaaaaggaagcggtttccatcaagaacggaaatgatatagtcaatgcaatgctggatgattttcagttcaccataatgcatcagaatacctaccgtacgatttggacttgtttgaaccagcaattgttttacaagcgcagcgaatggattcttaaatattggggtgcagcccattcacacttgtttcttcatcttacatctttccaacttgatgaacgtataaacgttccctacacttcatctggacaaactgttgcaaacagccaaatggtagagcttaggcagaaagaacggaaagaatttaaggagtttcatatcgcattaggtggacttttgttatatagaaaagaatatgaacttttaaatcaaatattgtattacactaatagccaaccccctcattatgtactgattccaagttcactggctgaaattattccactgtatatggacttgctctcattcagtcccgattcaatgtacaaatacgagcaaaaatatccattttttggtcttcaggctggcgtacgcaacaatagcatcatcaatggctggatacagaaatacttgtatatcctaatgttacgtctggcaacacttaaccgcacctatgtttacgaggatttttattcactgccggctcttcctgaatccttatccgaaaagaacgaatggctggaaaatgttccgattatcctgaaacagattgagcagaattccattccactggaagacatcacaacaatactgccattggatcagtcgtgcatatacagggctaaacataagctgaagaatgcactggagtccctttccaattcgcttacttcaacaatacaacatcaaaaagttactcaacagctgtctgaagatgaaattcaggatttttaccaaatagcatcagatagtattggcagagaaatgaagtggattacagaagtttctgtcataactgatgatgagtacaaaagctgtaacaagttcaattgtgtcggaagaatacgtcagctgatgccggcagaggcattctgtacggataaaacaataggatatgtcaattttaaggagtctttcagtgctgctacactatactctttcaaaaactgctggctccgaagcttccagtatcagcctaaaagtgaatatagggtttttccggagaatcttgacaaggccttccagactttaagattgaccgacaaacagataatcatcggattccacttcaactggtacaatgcttatcctcagaatttacgaaaggaaaacgagtataagttcaaatcccctgacaacagattgttgtatagtctgcctggagatcatacagtcgaatttacaaatactgtgattattctcaacaagtcagacctgcccaaactgaaattacttgatccgccttccacactaaaggacaagtttcatttgaaatgtatcaatgaacaatacaagttatatgcctctgtaatcaaattatccgaaaacaaacctcttctgaatgaatatatcagttcgggagcatacttggaaaaagaattgaaacagatggcattggtttgtacagagctggacgcacagatactatggaagcagaatatacctgttgtcatgattaaggtgctcgaccgctttattgacagcggcaatgaaaatctttccgaaatccgtccgttcaatgccgactgatacacattcggatatcagaatgacacttctgactattagaaaaccatcataaaacatacaggttaaaaattggaaaaacaaagaattgggaagacctctatgttcactgcaaatgaaacacaacattcattaggtcgtttcatttagaaacactatctttgtaacaggtctatacaataaatatatgagtagaatcaagattaaaaacttcggtccgttgaaagaaacagcatctgtaacggacggatggatagatataaagaaagtaaccgtttttacgggtaaccagggtagcggtaaaagtacggttgccaaactggtttccacctttacatggatggagaaggtcttgacacggggtgatttcaaggagaaagaatttaccgccgccaagttcaagaacaagtattgcggttaccatcgtatttccaattatttcataaaggaacagactgagattttctacgaaggggattcctacaagtttacctacacgaagcaaggcgaacttgtcatagaaaagaatgagaatgcattggacagctatgcccttcctcaaatcatgtacgttcctgccgaacggaatttcatcagcatggtcaacaaaccgaatctgattaaggatttgccggatgccttgctaggttttcttacggaatatgacaaagccaaacaacgcattaagagtagtctggaactgcctatcaatcatgcgcaactggaatataacaaacaaaatgacattgtttatgtcaaaggtgaggactataaggtgaagttgatggaagcgtccagcggattccaatccatcgtaccgctttatttggtttctttacatttgtccgaatctgtaaaaagtcaggcgaatagtgcccagaagatgagcagcgatgaagcgaaacgcttcgaagcggaagttgcgaatatatggaacataccgaaccttacggacgagcaacggaggattgccctttcagccgtttctgccagattcaacaaatcggcatttgtcaacattgtagaagaaccggaacaaaacctttatccggaatcgcaatggatgataatgaaacagttgctggcttttaacaatgctttggaaacaaaccgtttggtagttacaacacatagcccataccttattaatagcctgaccgtcgctgtcaaagccggtatgctgttggctgtaggtaatctttcctgtgaggtacaagaaaggataaatgctatttatcccatagaagctgccatacaccctgacgaaatcgctatttacgagttcaacgaggtcgaagggacagtaacagtactggacacatatcatgggcttccttccgatgagaacttcctcaacaggatgctggagagaacaaacgaagattttgccgatttattggaaatacaacaggaattatgattgacttcttcccgacacaacatatatcatcatcaaacagacgcaaattcggtatatgcgaccggccggctcctgccgctgaaaaagcatatattgcagaaagacaggggcaggattggattgcggcagtggacaattatcctcaggtaaaggtgaatttcgtaccggttgaccattgcattgaactgcgcagggcggacgggagtatggacaaccgctgcgacggctgcctgttttatagagatacgattatatttgtagagttgaaacaaagaaaaggcaagggtaatcaatggataaaagacggcgaacagcagttgcgttctaccattggttattttgaacaacaggaagaggcacggaattttcccataaaaaaagcctacatagccaatagtgaaaaacctttgttcagaaccggtcaggcagtacgtatggaacgctttttctcggaaacaaactatatactgagaatcgagaacagaataaatattgaataattggttgaccctgcagtgattttcggcgaaaaacggaactccggtacgaaacttgatgcctacatttgcactgttaacaaaatgtttcacttaaaacctgttgatttatggactatatccaaaagattaagttgctgaacgagttgatgctcaatgcaacaccgcaaaatgtagatttcatgccgcaaaacggcaattattgtgtggcactgatagctacgcgacctgttcacacttggggataccaaaagcgtaacttcaagattaagggacgcttggaagaaggcaagacggtctctgccgatttgatagcggaaaatgaaatgctttttggcgtggaagacctgccttacgtggcccacgagggtgaccgtacccctatcttcaagataattcgtgcttccattttctgtgcttatgcggggttgcaacttacagacctgcattgggggatgcggaagattgcctggtcagattatcctttcaagagaccggataaggaagaacaggcaaaagcagaagtcagatttatgaaacgtctggcatcggtaatgactgttccggatcattgtgtggtaggacgttccgtggtaacccatctcacttccacccgtttgcgggatgttatgctgtacaacaaggagtacgaaccgtccttatatggaaagataaaggattcaatagaatccttatttccctttattccggcaaaggatcatgccgataatgtggttcccgatgtatttgtttcgcaacaggattgggaaaatcctcgtgacacttatgaacatcaggttatcatactcaatgccaaaagcaaaaagaaagaacagttctggtgggattacttgaaactcaatattttcctgagcgatttggagtattatttcggctactatattttgatgaaccgttggcagattccgatgattcagaggtggattgccgaatatcgcgaaaaaggtttcttcgagtcccagcgtgcgaaggattatattctgttctatttgaaagccggagaaaagacaccggttcgtgttttaaactcacagggggtgcaggttaagatgaagatgccttcaagataagccggtaacataatgtttctcatagggaaaagcggattatgtatatttcataggcatttctttgccgatagaatgcataattggcctttccctttgtttttatggtatatatttatacttttgccgtaaaaaataccatccggtcggtattttttagggatatggtggaacagggatagaatccggttgccagaagatggaataacaaagacatagaggaacatctctgttttgaaattccactttctgtttgggttcctctatgccgaacaaaccgactaatcggcttatttgaagacaaatataagcaaaaaataatatatgtataagaaaaaaaagaaaaaggcatcgttggcatttatttcataaactggtatgtatggtcataaatgatttaatggtaattgggtaggacatatttaattatactaaaaatgaacgtgttttcactcaaaagacctacttttgtatgatactaaaaaacaaggttatgaaaggagtaaaaggctcagaaacaaaaagattaatcagggaagctgcatacaaacagtttctgacaaaagattacaacacggttcccctgaaggagatagaaaaaagtctgaatttatcaagaggatgtatgtcatatcattatccaagcaagcaagaactgtttattgatgtgattgatttttacatttttcacaaacaagatgccaaaaataagttcaaggacatttctcacacctctctgcttgaatttattgattattacataaagaaggtggaggaaacgatgaatgcaatgaggatctatctcatagaaaaagagaagaccaatattacacgtgcatatcttaacttgattttgcaggcagaatatttctatccgggatttaacgaggctttcaacgaaataacaaataaggagattaaattatgggaaagaatatttgtgaaggctgttgaaacaaaagaaataagatccgatgttaatccttctacattggctttgacatttcgaatcctgctgtttggaaaatgttttcaggatgcattggtgaatggattgcgaatagaagaactgaaagtagttctttataatcaatatgaactaattaaaaattgaactaatgaagaaagatgtttttattactgggcttgcaagcttctttccgaactctcctgtttccaatgatgaaatggaagagttcttgggactcatttctggaaaacattccaaagtgcaacggatagttttaaagcaaaatggaattaaacggcgatactatgccttaaacaaaaatcaagaaatcacacatacaaatgcagaaatggcgatgctggctatacgtaagttgctggcattgaccaataagagccaaaaggacattgagttgcttgcttgtgctactgcgacccctgatcagattctgccttctcatgcgtctatggtacatgggctttgggaagaacctgttgaaatattctcttctgctggagtttgtctgtcttgtctgcaagcgctgaaaatagcttatttgagcatagctgcatcagaaaaacagaatgcaatatgcagcacatctgaattggtgtcagcaatgcttttatccaaaaacttcgatatcgaatatgaaagatgctgcaatttgggcaccaatccatatatggctttggaaaaggacttcctgcgctttatgttaagcgatggtgcgagttgtgcattattggaaaatcatccgggagaaaagggcgtatctttaaagattgaatggatagaaatggattcatatgccaatgaaacccctacctgtatgtttgccggagctgtccggagggaggacggtgaactgaaaagctggaaatcttttgaaagtcaggaattggtcgatgagtcccttatggttattaaacaggacattaaacttttagggacgaagttgatgccgttatggattagacatattaaatcatgtctgaataaacatggcatgactcctgacgatgtggattatgtaatacctcactcttcgtcaatggttatttatggtaatctcattgaagcgatgaaaaacgagagttttgaattgtacaaacgagagtggtttaccaatcttacctgggtgggaaatatcggatcgtcagcaatactggctgccttggatgagttctgttctacccgtaaactcaaatccggtgaaaaaatactgctgcttgtccctgaaagcggacgcttttcttatggaacagtgctattaagtgtcgtataaatttggaaataaacgataaataacgtatttttgcgctgttaaaacgacatagtatagtatcatatatcatcttccaaacgaaaagtggaaaatttcaaagagacaagatggaatatgacagcttgcgctatattaaaatatatagcacaggtgcgtcacttcgtctctaggtattccactaccatgtttggatgttgattgcgtctgtgctatttttttataatataggcagtaggatggacccgaatttgaaacagcggattatagaggaggcatacaggttattcatcacaaaaggaatgaagcagacctcattctgtgatgtggctgttgccgtgcataaatccaaaggggctgtcatacactactttccttccaaaaagaaactgattgatgcggttgtcagaatgcgttttttccccgactcgcagatttcttgtgaaatgtattctttggctgacaaggattggaatgagtttttaaggcaatacagaaatccgatagaacgggtgataaacagttttcccgaacatctgaatggcaatctcctgatatgttatatgcagtttgtttcctccgcccatgaatatatggacgaatttccacaaatgtatcagcaacttcttgtccgggaacaggactttctttccaatgtggcttatggtcataaaataagtttgaaggatgccaaggcgttcagcagacaggcattgaacacttctattggtaagactttcttggggatgttctcagaaatttaagcccgcattcctttccttttcctccctttcagttcattccgttgtcttttagactgataaatgataaaactttacttgctggaacctgttttttttcattattcttggaaaaggcttatctttgcaaaataaaccgactggtcggtttattttgcaaagaattttaatagaatataatgaattaaaaagtgaataattggaaagtaggaataaattgttgaaatctttgcgcctgcaaccgcttcttgccaaaatagcggtaggatatatggccaagattgtagtcataagtggtattgcttacgttggcatctgcgaatggaaagagactaaggctagggaaatggaagtacggatgattaaccggaaaaagcatgagataaatgatatatacgtgaaaatgctcaggctttctttcttctgtgaaacctttatggagtggagtgagcaggattttttatcatttcagaaacggagacggcacattgacagcctgttgtgtagcttgaggtactcctcttccggctcacatacagacagcatccgtaatttgtggagagccaaggagcggtatatgcgggaaatcatatattgggtacacaggcaggaggaagccgaccgggaaattgcagcgaagattccggccattgccagacagagtgaacgggaaaatgccccaaaagggggattcctgaagaggttgttcgcaaaacgccacagggcggattctccttctgccgcctccatgcttcatgagcttaatcggagcgtggttggcagacagcaggcgtatgcccggaagctggcagaacggacggacagcttggatgggatgaacagaaggctgaatgtgcagttgcggcagatgattgagaatatggatggaacggtacaagcggacttgaagagacaggaagaagaagttgcggaagccgggaaacggtcatttgccacggtcatcggtctgacggcattcatggttttgctgctgatatggtcctatatggtgatacaccgggatatgatgcgtataaaccgttataaaaaaaggctggaaggcacagtccgtcagttggagcagaccgttcttgaaaacgaggaactgattgaggcaagaaagaaaatcatgctggccgtaacccatgacttgcgtgcgccgcttgcttctatcagcagctatgcggaattgctttccacggaaagagaagtgtcgaagtgcagggaatacagccggaacatacggcaggtggcgggacacatgtcttccatgctgaattccctgttgggatttttccggttggagagtggcggggaaaaggccgttcctgtcccgttcaggttatgttccgtcaccgagattttggaaacggattttatgccgctggcggcaggaaaaaaccttttgctgaacgtgctgagtgccggagatgcggttgttataggagatagggacaggataatacagataggaagcaacttgttgtccaatgcaatcaagtttacggagcggggaagtgtaacggttcgcacacaatttgaccagggcgtattgacgcttatcgtggaagataccggcaccggaatggacgatgaggagcagacacgcattttcactgcattcgagaggcttcccaatgcgattgcggaagaaggggtcggactgggactttcaatagtaaaaggtctggtcggattgttggacggcaggattgaagtggcaagccggaaaggggtgggcagccggttcactgtctgtcttcctttggctgtggcagaggaagcgatggcggagagcggcaggagccggatttccgtacggtcctatacggtactggtattggacaatgacaccgttttgctggcggcaatcagggaaatgtttgcgtatcacggggtggcttgcacggtatgtgagaacacgcgtgatctgatggagcatgtccgcagccgtagttatgaccttttgattacggatttgaaaatgccccggacaaacggattcgaggtgttgaagctcctgcgcatggccaatgtgggaaattcacggagcattccggttatcgcgagtaccgcatcgggaaactgcgatacgggggatttgtatgcggcagggttttcgggctgtttgaaaaagccgttttccgccgaagaacttttgcaggtatgtacggaatgtctgggaagtgaaaggcagtctgaacagatagacctcgatgccctgctgaaatatgggaacaggcggaagatgctggataccctgattcgggagaccaggaaggatatggaggctatggctgaatgtgcagaaaagaatgatcatgaggcactgaaagaatggatacatcatctgacaggctcatgggagatcattcatgccggcaagccgctgcatgagttgttcgcactgcttcaggattcgggagagttttctgtggacgagttcgggcggactgtacagcaggtattggaaaaaggaaaagaaataatatgtttggcacaacaggctaagaaagcttatgagagtaattgttgttgaggacaatgtcttgttctgtaattatatctgcaattttttgcagaaggcggatttggatactgtaaggacttacaggctggcacaggctaagaaggtcattgggacatccgtccgtgaggatgacatcgtattggcggatttaagattgcctgacggggaaagtaccacgctgttgcagtggatgagggagaacggctatatgcacccgttcatcatgatgactaattatgaagagatacattctgcggttcataccatgaagctgggtgcggaagattatatcctcaaaccgctggttgaaaccaggctgctgcccgtaatcaaaaaaataaggacggtgaacgaggctttcaccaaggtaatctatgaacgcaaaagcacccctttttgcgagttgaaccggtacattcacatggtagcgccgacggatatgacggtactgatattgggaagcaccggaacgggaaaggaacacctggcaaaaaagattcacaggcagagcctcagatccggcaagccgtatgtaacggtcgattgcggcagtttgtccaaagagctggcaccttccgcctttttcggccatgtcaagggggcgtttaccggagccacagaggaaaaggcaggatattttcaggaagcgcagggaggcaccctgttcatggatgaggtggagaacctttcgatagaaacgcagcggatgctgttgcgtgccatggaggaacggcggtatcgtccggtaggcggacaacgggacaggctgatggatgtgcgcatcattgcggccaccaatgaggatttgcaggaggctgttgcggaaaagcgtttccggaaggacctgctttatcgctttcaggattttaccatcaccgtacctgcattgcataattgcctggaggatatactgcctttggcggattttttccgggagcaatcttgcggattgctccggaaagaggtcttggattttgacgaaccggcaaagaagatgctgctgggatacagttggccgggaaatgtacgggaactgaagcaggtcattcatgcggcggtattgatatgcaaaggaaaactgattacccccaattccttacggctccaatatgcgggagagcccgtttctgaccccatggggaaagagaagatagacaagtgtttgcagaaagatgaaagaagaaacatagaacagatcaagacggctctttccatctctaaagggaacctgacacaggcagcggccttgttgggaatcagccgcccgaccctttacaagaaaatgagcctgcacggaatttccagataggtttgtttgcgatacagttttccccctcatcaaaggaaaatcgaatttgtcttgccggccgcatttgccgaatcttttcgtggaaattttccttgcggcttcgccgtggaaaattttcacgaaaaagaatgcggcggcaatccagattcgatttgaaaaacgattacaggggcaaactgcgaccgatgtgacgcatggataaaggatatgggctgcttgaagaggccgtatttcataatccatgaaattccacatatccagccggaatacaggtcttatgaaagtcttgctgtaaaaaagcggaaggcatgagaagacagggggcttcagctccctctgttctgcatggttttgtcttgcctgcccgcctgctcttttctggtgtcggatgcgcaggctttttcccttctgcctcacgtatcttctctctttccgtttattcacttcccttcttctccgttcacggtttagccgttgggaacagtcatgtttatgacatctgacgacatttgatgacatctgatgacacctttttgaaaatcagcatattatttggaaataccccatacctttgaagcgtcaaagcaattcattaacccctaaaagaaaaggtatggcacaagaaaagatcccgaacgaaaagcccaaacggacccggaaaccgaaggccggaagtgatgctcttccggtggaacagattacggaattgatgcttgttcataacaagaacgatccgaaattcggtgtacaggctgtcagtgaaattgacaaggacggaaaagcgaagacggttccggcggacgagaagaatgaaaactcattcctgaaattcgacaagaattcgagtattctcgaaaacttcatcaagaatttttggagccagctcaaggaacctacccatttccgcctgctccgcatgacctaccacgactacaaggtgaacaagcaggccatcagggatttgtcggagggaaagcagacggatgcggtgaaagagttcctcaaacgctacgaaatccgtccgagagaaaacaagaaggaacaaagtgtaaaccaaaaagaaaaaacagctatggcagacaaagagacacaaccgcaggaacccctgcaacagagcgaagtacagcaggcggcacagcaacagcagcagccccaggctcaacaggcagcgcaggagtcgcaaggaccgcgttaccggtataatgagaacatggtcaactgggaggagttggaaaaggtcggaatctcaaaggcttcgctggaacagcagggactccttgattccatgctgaagggctacaagaccaacaaactggtgcccctgaccatccatctttccggtttgctgacagccaaactggatgcaaggctctcactcatcccgcaacaggacggacaggtgggactggccattcacggcatacgcaaggaaccgcagttggagcgtccttatttcgggtttaactttaacgaggaggacaagaaaaacctgcgtgagaccggcaacatggggcgtgtggcagaactcaacctgcgcggcagtgaatataccccctgtctgatttccatcgacaagagcaccaacgagctggttgccgtccgtcaggagcacgtttacatcccgcaggaagtgagcggggtcaaacttaccgcagaggagatcaggctgctgaaggagggacagcctgtcaaagtggagggtatgacttccaaagcaggcaaggaattcgatgccacactccagtacagtgccgagcgcaggggactggaattcatctttccgaaaaaccagattttcaacgaacgttccatcggaggcgtgcctctctcgcccacccagataaaaatgctcagcgaaggacataccattctggtggaagacatgaagttcaggaacaggaatgacaccttctcgtcctttgtaacgatagacaaggttacggggcgcccgaactacacgcggcacaatccggaaaccggagagatttatattccaaaggaaatctgcaacgtgcagctgactgccgaagacagggaaaccctgcgcaagggacagccggtctatctggaaaacatgatcgggcgcaacggggaggaattctcctcgttcgtcaagctggatatgaataccggcaggacgatgtattcacgcacgccgaacggattcaacgagcagcaggcaccgcgtattccggcggaggtttacgggcacgtgttcacggcacaggaaaaagcgaacctccaggatggcaagactttgcttgtcgaagggctgaaaaacaacgggcagaccttcagttcctacctgaaagtcaatccctattccgggcagttgcagtattttcaggaaaatccggacatccgcagggacacttcccgccgtgccgcacagacggagaccgcacagggacaacagcaggagcagaagaagggtgcatcgcaggcagtatagacctgcccggagagaaacagaatcaatcatacaaacctaaaaaaacgaatcgtatgaatacggatcagaatacccgtcatatttataagacggaagatatcgactgggacggtctgaaggccgcaggtatcagtaagaaacaactggaagcggaaggcaacatggaactgttgctgcaaggaaaggaaacgggcatcgttccgctgaaactccatatttcggtcctcagcctgacaatggatgccacgctgaagctggtacccgacggcaacggcagaccggttatggaaataaacggtctccgtcagaaggaggaggcggcagtttgaccgggaaacaataagtataactcacgttccgtgccgttcctgacggtacggaacatcaaaaggaaaaagaatatgatagcgatagtgactgacaagcccaatgtgggcagagagatagcaagggttttgggagctgacagaaaagagaacggatatatgagcggaaacggatacatggtaacatggacatacggcaacatgctttccctggcgatgccgaaagataccggtacggcatgggtggagcgggagaacttccccctgctgccgcctccttttctgacggtacggcatgtaaagacggacacgggatggaatcccgacatcaatgcggtgctccagttgaaggtgatagccggggtgttcgatgcgtgtgacaccattgttgcggcaaccgacgcttcccgcgagggggaaatgctgttccggtatctttatcgttttttgggatgcaggaaaccttgcctccgcctgtggatctcctccttgacggacgaagccattgccaaaggaatggaaaaccttcgtccctgcagcctgttcgacaacttgtttttggcggcagacagccgcaacaaggccgactggcttcttggagtcaattcgagctatgccgtctgcaaggcggtcggtttcgggaacaactcgcttggaagggtacagacccctgtattggcagcgataagcggacggtacagggaaagggaaaatcacattcccgcagacagctggcccgtattcgtcagcctctgcaagaacgggaagataataaagatgcggcatgtggaagatttctgcaaccgccgggatgccctggaactttacgaggactgcaaggcggcaggatatgcccgtatcacggcggtcaacagccggactgaggaaatcaccgcacctgccctttataacctgaccgggcttcagaaggatgcgaaccgttaccataacctgacagccatacgggtgcaggaaattacccaaagcctgtatgagaaaaaactgatctcctgcccgcgcacttccagccgtctgctgcccggagacgtgtatgacatgttgcctccggttatggaaaagctgctgtccggcaaggaattccgtcaatatgccggtatgatcgaccttgctgcaaggaaaggcgtaaccggaaatcaggacacggcggagcatcatgccattgtcatcaccggcatacagccgggggaactggacagggaggaaaggctggtttacacccttgttgtcggcaggatgcttgaaacgttcatgccgccctgcaaggtggaatatacgacggttgaagcggtctgtgccgcacgcaagttccgaatccgtacataccgtattctggaagcggggtggctcggtatctttcagagggaacggcttgtcgcggaagacaacgacctctgtcccgtaccccctgaactttttcgggaggagaagctgccggtaacgggatgcagccttatacacaggaaatcgctgcccgctgccccttatacggatgaggaactggcggactatatggacaagaccggtctgggaaccgcatccacgcgcacgaatatcatccgtacgcttctggagcgtaaatatatccggtattcgggcaaatacattatcccgaccccaaaaggtcttcttttatatgaaacggtacgcggaatgaaagtggctgacgcctccctcacctccggctgggaagcggagctggcacggattgaacagggagaactcacacagaaagaatttctggatggcgtattggaaacggtaaatgaggttaccggtgagattttccggaaactttcggaagatggacagccgcatggttccatatagacggctgggcggaaggtacggaacagaagaggtgcagactggggtctgtgcctcttttttatatatgtacaagatacgtttttccgcttttaagcggcaaaggtcttggattgcctcgtttttgccgcaaggcggcccctttcaggggctggtcggctaaaagaaaatcatcctcgcttcgctgcggtattttcttttgccaagccttgcgcaaaaaggcaatccaagggccggaggcctataaaatcgggaaaacatatcccgatgggattattcattcttaaaaatttaaagacatgaaactgaaactcatcgaaaacatctgcaggcaagtggtcgcactggttctgcttacgggaatatgcctgctttactgcaagggcgtcattcccgtgtacctgtctgtcctgttccttatgtccggaacactggtccgtctcgccttcaggacattcacctttgtcttgaaaacaatccttgtcctgattgtcatgggcatgcttgtataaccatcaaatgcagaagatatgagaacttacacatttacatcctcggctccggtcatgccggctgcatggcctgccacaaaccggacaacacctgtcaaaagacagcctccctgtacgacagacgggcccagacgtatcggctactatctggaaccgttgaaaggcatcgcctcgaatccggacaggcagagaatcctgaaggattttttcaaggaaacttatgtataacattttaaattttaccattatgttttttcaagcaatcaaccaaatgattacggcaggcacagacctgagtatcaacatcagacgggtaaacgacaatctgacggttgccgtcgttcccagacggtcgggagtaaaggccggcgaacgcattgtcccgctcatcctgaacggtacgccggaagaactggatgcaggattcctgcaggctgtcggtgcacccgtacagaaagcgcaaggtatccttaccaacctggaatcgttcgagaagcaggcagagcaggcggtttcacaaagcaaaacctccaagcctacggtggaaaaggagtccaaggaagcccgtgaaaaacgggaaaagatggaaaaactgctgaagaaagctgaggatgccacggcaggaaagcattattccgaagcattgacctggctcaggcaggctaaggtactggcacagccggacaaacaggcggacattgacaaaaaaatggcggaagtgcagaagaaggcatccgagggaagtctgttcgacatggtacagccgccggtaactgatccacagccatccttgcagcaatcggctccacaaccgatggcagcccagacgccacaataccggagcgaagagcaagttccgatgtccatgcccgaacagcctgccccggctccgcaacccgttgcacagccgcaagtacagcccgtacaatataggcaacctgcaccgcaaccggttcctcagcaggctgctccacaaccgcaagaaatccagttccatcaaccggtacaggtgccgcaaccgcaattggcggacaatcgctggatgcaacaaccggctccgtcacagtatgcaacggtgcaggaggctgcaatgtataacttcgacaaggattacgaggatgaccgggagctactcagggaggacccttatgcggaatatccggactttccgaaggaatgccgcatgacggatatggcacaaatggatatggtatattgttaaaccctataaaagaaaaataatatggcacttgaaatcaaaggattgcagagagtattcaaattcaagaaggactccgtggagctcgtgttggatgatccgaacagcgaactgtccgtaaacgaggtgatggacttctattccatgacctaccctgaactgactacggcaacggtacatggtcctgagtgggaggacgacaaggcggtttaccgcttcaagacaaccatcggagtgaaagggtaagcggtatgaacaagaaaaaaaaggataaggaaacatgcagacagctttcagaacaagccaaggatggactggcacggctgattattctctcagtaagttcgtcccacatccgaaggggaacctcggaacggaaaagaaggatacttctgccaccgggaagcacaatgcttttctgaccggtagaatcacaccccttgcaccggattattggcatcaggatatggataatgattctccggtcaatctcacgactccggaaaattttgactatctctaccggtcggcatcaagatatgcggaacttatgggtataaaactccctttccgatacaggaaagggggttgcccccgcctgaatattaccgagttgtacagagttatggaagagtgtgtaccggagtgtatcaatctggaaaagaaggacggaaggctgcatttctgtctgttccgccatcatgactggccggaacctactttgttttggattccggttgattttaccgaacggctttcggcatcattgaagaacattgtcagggagttcatccggctatttgtccgacaccacagactgtacgatattactgagacattttgttatgactttgccatagaagaactggaagactggggaaaccgggattccgatgcttccccgaaggaaatcagggcgaacaaacggctggcagattcctatcagtctggaaaacggatgaaagcactcagacggatgtcgggcaaaccgttctgcaagtctttggaggaggctgtgcggaattaccggacaaaaaaggaaaaagagctgaagctgttggaactgattgaggacggcatggcattgattactccggaaagcccggtattgacaggctaccagtacgattgggcttatgaagaggaatgcgattttcccccggtgggaatggaaagccaggtcatactggtctattctgctgatgatacattggcggagtgtgtcaaggggtatatgaattcggattatcaggaaacctatgcccttactccggtcacttacaagctactgacaccggaaacggacagtctttttcagatggatgactatccggaaaggctttccagatggttggtgtgttttacaggctatattgatgacaacttttaaaacgaatgacatgaatgaactgactaagaaacttcaacaggtgatggttcccaaagcggcactgattgcttacgaatacagtgatggccgctatggacacgggacatattatctcgaactgcatccgatcaacgacagaggccggatggaggctgccgtccccgttacgtatgaatttatggactcccttgtggaatactatacggataaccggcaggatgtaccgcatgggaaaatccccaccaatatgctgtggtgcgatacacgcaagggacacgagaggtacatctggtacaatcctccgggaaaacggcagatgttcttttccgaaaggctgaatattccggacgggacattccatgtacccggtgtcatttacagggcttccggtgacagactggaaatttttgcctataagggagaagcaccggcagaagacagcccgcttttccttgccccgtttttcaatgtaacgggaagcagtgtctgcctgggaaatgcctcgttgactcctccggaaaacatgactttctcaaaactccttgagcattgggaaaaacgcttctggctcagtgaattttcccatttgggaggaagcaggaatcccaccgaaagcaatctggtttcggtgacggaaaaggcacggaccaatccgtttgactataacgaattgaaacctatggacagacaacttaaagacttattgatatgaaaaagattcattatacagacagatacctgctcaatccccaccatcccgtaaccgttttcgtaatcggtgcgggcggaaccggatcgcaggtggccaccaatctggcaagaatgagtatcgcattgcaggcactcggacatccgggcctgcacttgacggtttttgaccccgatactgtcacggaagcgaacatcggacgccagttgttcagcgaatccgagctcggactgaacaaggcggtggcacttgtaacccgtatcaaccgctttttcggcttttcatgggaagcaaaagggcaatgctatccgtcaggaacatcagattccgttttggcgaatatcatcatcacctgcacggacaccacccgttcacggaccggtctgtggcgttttttgaaaaagcatagggaacgttcatacgatgacgagaaatcaccgatatactggatggatttcggcaatgcccagaccaccggacaagtactgataggtaatgtcaaaagcaagataccgcagccctcctccactgaatacctgcctatacccaagatgaacgtcataacggaggaagtcccttattccaccatcagggagaaggattcaggaccgagctgctcgctgactgaggcattgcaaaaacaggatctcttcatcaattccatgttggcacaaatcggatgcgacgtcctgtggcgcatgctcagggaaggaagaacgttctaccggggagcctatctcaatcttgacacattacgggtaaaccccatcccggtatagaacacaaacgtcagtttctcctgatacataaaacgatgtataggagaaactgacgttttggaacactcctgctatgcggtttaatatttcagccgtacggcatttgccactcccttttccgtcatgaccagctcataccggtccaacttttcatagagtttgcccaatgtcttgcatccatatctcctgaccttgaatttgggcatcatttttttcaatgcaccgccgatcagtgaaagggaaacctcttctttgccgtcagccgcctgctcaaaagccttgtcgaaatactccatatcccttcggataaagaattcgggagtgttctcctctgccttgctttccttccggtcggcatacaggaatacggaacaggaccgtaccaatgacaccggggtctttccttccccatatcccagcactttcaccccggcttcccgtatccgttgggcaagcaggctgtaatcaccgtcactggccaccaggcagaaacagtccacctgcccgtcccgaagaatatccatcgcatctatgaccagtgcaatgtccgtcgtgttctttccgggaacatgggaggaagcttgtacaagcctgaatccatgctccctggcactttccttccatgcggaaagcgctttcctcgtccagtctccataaattcgtctcacaacggcatccccgtaacgggaaacaaagcccattatatcttccatcctctcaaaggatgcgttatccccgtcaataaggactgcaacggtatatcttgaattggcatttgtcttcataacaactgtttatgaaacaaagttagcataactttcccatgttggtattcccgcccttatcttttttcccacgtttctgtaaaaactcctgtatttccgagcttctgtagaagtttttcccgttatcgtccgtctggtaataacggatcagccctttttccctgtaacgggcgactgtccgcaatgacacgtttagcagtttggcaatgtcatagttgtccaaaagctcgtctccattcaggcagtccttcacgcgtcccatcctgtccagtttcttttctatacggtcaaaaccttccactatggtcattatcattttttcaagcacttcattgtctatatacatcatggcaattttctcctgtctttttaaaggttattactggaatacccttttcttgtgcgcactttcaagagtatatgccatgttcagtgaaaaatgtatgccacattatccgtttatattggacggggaattatataacactgcaaatcaataaaatacagatataaaaatagtataggggaaattgaaatgtaaaaattcgaggtgtaaaattgtaaaatccgaatgtaaactttacaatttacaggtcgtcagaccttctccggatcaggactgatagatggcgtttccataccaggcgttttacttttgccggcgaaggcatctgaaaggtacgggcaagaaatacagcaccttccactttggcaccggccctttccagattatgggcgtattccatcaggctggatccgctggtcagcaaatcatcgacaatcaccacgcgctttccgtacagatcgtttgacatcatatagttggcggtatttatttcagagcgtttttctgaggcgtgtttacactccctgctttccgtaatgcatattaaatccagtcctgaacggacatagccatgcgtttccagaaaaccggcaatacctgagaaacgtctgtaatagcggtctgatgtgctgcacggcataaacatggcagtaatatcctcatcagtggaaagaagcaggaatgcttgtgaaaaatattccgtacagctgtcttttccatccttgaaatcatatactttttgcacgaatgccaactggtcatcacaaagccagctttcaaagcgtttgggaaaataatagccggcaaacacgcagcgaatgctcccgaatgagaacaatcgcaacggacggactttatcaaacagctcaggacaagtcagcgcatataacagcggtgcatgaggatttcctgctatgatggcttgacgtagcggtttctccctgtcttcccgctcatcgtaggctgctgcatattggcatagcaccttgccgcacttttttctccagtattgtccgtatatccagagaacgatagccgttagtaataatgttgcattgattatcagttccatatttcctgtttttttattttcggacagattgtccgggataaaaatactgtttttccggtaaagaaacagacttttagccattcttttaatttgcttccccaaacagagcggtctctgacatctgatgacatctgatgccgtttgatgacatccttttgcccatgacttttacttcccgtattttcgtgccggacaaaaaaagcagagtttatggaatttgtatgtatcgaagctaaggcattcatggaaatgaatgaggctttggaagccgttgaaaagagaatgcgtgaaacatgcggaggaggcatctgtagtatggatgactggattgataaccaggaagcgtgtatgcttatgaatgtctcgccccgaaagctgttgcaacttcggagaagcaggattatcccttacagccatatagaccgcaaggtatattacaggcgtcaggatattatacgttatttggaaaacagtattcaccatgtaacccccgaatccttatgactcaattcatactgaccaaagaaagccctgagattatacgtttttttcggaacataagcaccctgtccaaaatgctggatgatcaggagaaaaaccttcgtccggtcctgaacggagagcgttacattaccgacagcgagttggcggagaaattgaagctgacacgaaggacgctggctgattacagaatgaacggcaggctgccctattacaaagtaggaggcaaattattatataaggaaaaggacattcttgttctgttggaaaaaaacagggtggaaacatttgatcattggtaatacccgtttccaagtatcacgacataaacataagaaagtcatggaaacgataaaaagagagggtttcatggctttcttattacagaaccggcagattatacgtttttttattttggaatcatatatcggtcagcatttctatttcttacatgtaaaggtagccttttgcttctgatgcgcaaggcggtccttcggactggttggctgaaaaaatcatcctcgcttcgctgcggtattttttcgccaagccttgcactatcagagcaaaagacaaatgtctgacatgtaagagatagaaataccggctttgccaaagccggaaatgtttaatcacaaaataaggaaattatgattcagacaacaaacaagtatagcaaagaaactttcatccgcctgaactactggtatgatcggatatatggacttgtacaggaagatatagataaagtgaataccatggtggaacacatcgaaaagacacgctccggccagtatccacggacaggagacaacctgttctttgtttccggttatggtgagcgttcccggctgttctttatagatgccgtatatggagataacattatactccgggatttttcccgtgttccattcgtgtcccgtgacaaagagggtatcaaatgcgatatgcatggcggtgagtgtctgttggtaaaggcaggcgatgtaaggttcaaggcatggactaccggccgtttcaagcattgggggcattacggggcatgtgaaaacggggaggtttactacgatgcgaaaatagccctgtgggagtgtggcgcacctgaacagccggaaagccgggaatggttcaaaatccatatccgcaaaaacacccggccgagcgaggatatgtacgtcggagaaatatcctgtaaggatgaggatggactcaaacagtttgtcaacgaccatgaaggtaccatattcgcagaagaggattctcaggaaatggtcatgctgtgtttcaggcattccgacatgaggatttccccggaagaatgggaaaagatggattgtccggtatccatgcgtgagatatacggacagatgcatgaagtaaagattgtaaaagaccataaaacgcatctgaccacattctactattaacatagtatcaccacatgaaaaatcacccttgtttcctcctgccacatatgacaggaaagaaacaagggtatatcatcaggcagtcttttcaatacatctattagatatggagcagattgttcttcctgcacaaatattcattcagatccttatatccggaatattcatgcgaaaaatcgcatatacggattccgtatttgtcctttaatgcctgcaccgcatttttcccggcggtatcattatccagacagcaacggatgccgtcatattgtgaaaggaaagaaaaagccttctgtaagttactgacagaattcaacactatataatccccctcttccaaagatggaaaagccggtctgaaagacagaaaatccataaacccctcaaaaatatagcaaatcctgctttccggcgtgctaatgatgcgactgatgtccttgggagcaatacaagccttgaaatacctgttcctgatttcgtaccctccggaaatattagggaaagcgatggcaaaataattcttcccattccgtttaaaatgggcttccctgcatatttttcgggcagtttccagatcaatgcaccgttccttcagataagtaagcagtatccggttggcaagaggaatgattttcaaatcttgaaaggcgggatatgccttttcaaacggacaggaaacagtaaccggtttcagtacggctcttttatcctcaatacactgtagtacataacctatatcttgtgtccgataaatctccttggccaacgttataatatcccctcccttccccagaccgaaatcataccacaattccttatggaggtcaaccttgaaagaggcttccttttccgtcctgaagggcgatttgtaccatacgctgttcccacgctgtattaccggcttgtatccgaatccggctaaaaaatcaacaagcctgatgttctttgcttcttgtatgttcatggcatctcattttcatggattagttcactattaatacacgacaaagaaccgctttatatccgaaacataaaaagcagtgtcatcagatgtcattaaaagtcatcagatgacatcctgtatatcctttttacatgaatggctcaaaaacttttctgttttggcatgcacacctccttcatgcagcaatgccgcaaagtatgataaaggcatgaattataagtaaaaaaactgtacaaaataatatttatggagaagttatgacattctgaatagtatctgtatatttgtaaaatccaataacacataatatatttgaatggtataatctgtagacattatatcgaataaggttttagggtattgataaccaatagccctgttccttttcagtataggctctattttaatacagtggaaatttaaaatgttgactgccgctttactataaactattaatttaaaaaagtatttatgaacaacatgaaagatttgattgcgttatttgacaaccacaagatttatgatacggatatatggacaaatttccttattctattggtgtttacagatttgtatttaggtgtgtgttgtccccaaaaagaacctggaattacgtttcaggatttaactctaataaacctgattccattcgtaatattaggtattgtctgtatttggactgtgaaattttttacttgtatcctctttgcattatgtacactagcagtacccttaattgggaaatatatttttctatttaataatgaagaagtttcgatatttacgttgaaagaatatgcaatgaaaaccaataatactgtgattgcacaaattgtaagcgatatagagatacaaaaatcaagaaaggtaaagagtgctttaggaaaggtgggagctataatcttatgtttagtagatctctttgcaggtgccttcatgcccaagtcagttccaaactttttggcgcctagtgaaatagtcgtcatttgtatttttgctcttttagtgcttttggtttattcatgcaaaataaagattcaaggggtatatctttctaatgatttgcgaagcaaaatttccaactttaaagtcaacaccccaaacaataaataaattcttaatgcatttgatttagcacatgtttttatttttttctcttgttgaaaactataattaaaaggaatgaaaatatttgcagaaatcgaacctgtgtattatatttgcagtgtcaaagagacaaattttgtcagattagtaaagaaaaacaatgaatttagcgtaaggccaattcaatggttttcataaaagataaagcaaaaaatgtgcagtcactcaaggagttagaataaaccgaagcaaaaggttcgattcctggtggcaccacttgtaagaaaagcgttgtaaataagttatttgcaacgcttttctttttctatagaatgttacctaatgcatttccaggatcaacgtaaaaacggatcaacgtaaaaacctgaggggttttcttggggcagtagaaatttagtggggattatcgtttcctattctcacccaaaattccgacctttgcctcatggaaacaaatcaattggaggtgttggctcgcatcgtgcttccctctgaaatcctcaactacttttcagttgtcggcgttgaacagacctcaacagaaatacatattcatcttgatgaactgatgaatcctgcattatcccatgatgtacactttgaatccaagggcttcatggaaacagtaagtatcacggactttcccatccgtgaccataaggtcctcctgaagatccgccgtcgtcgctggaccgatacgcgcacaggcaagagtttcagtatccctatcaaccttgatgtcgtttgtaaaggtacccgttattccaaggaatttggtgcttttttaaaagaaacgtatggagacgtcccctgtgacctgccatacgcttgaggaattctaccatatagatggacatactttcgagaaacagtacaaggaaacactcagtggtttcaggaattgggagcagttggagcatgcggatgaatggattttattcccggagaacatcggtccgcatttggctatagatgagtcgtctctgtctaatggagaattatacacttttgtcaccaaccgtgaccggcatacacatgaggaaagccttgtggcagctgtcgcaggcaccaaatcggaggatgtcatacaggtgctcaaacaaataaacgagaaagcccgtgaagctgtggaggaagtgacccttgacctgtccgattccatgcgcaggattgtcaccattgccttccccaaggccaaacgcgtcatagatcgttttcatatacagaaactcgcctgtgatgctgtacaggaaatccgcgtagcccatcgttgggacgccttacagcagagcaatgaagaaatggaggagtgtaaacaagcgggaaagtcatacatgccttaccgattcccaaacggagacacccgcccggaactgctggtcagaagcagatacctcttgtttaaatccgcggaaaagtggacggaaaaacaaaaggaaagggctgaaatactgtttaaggaatatcctgatatacaaatggcttatgggctctcacattcattaaggatgatatttgcaaaaaacaccattaaggacgctgcaaggctaagcatggctcgatggtataataaagtggatgagtcaaggataaaatctttcaatgtcattgcggctacattctacgaacactatgatgatattctaaacttctacaacaacagggcatcaaacgcggcagccgaatctttcaacgccaagattaaactctttagggcaaatttacatggagtggcagacagaaagttttttctttttaggctggcaaagatatatggatatccccactaaatttctactgccccgttttcttttttaagcatacaacatcgtcagtctatataaaaagaatgccttatcttttacccctctgaactgtgccctgaacgctttgagtttagcattgaatgattccgccgctgcattggttgccctcctttcaaagaaattgataatattcagatagtgggtctgaatggatcgtgccactcttccgaaagcaagaaatccggatttatctacctcatcataccatcttgcaagtctcgtcaaggctacatccttaaacttacactgatgataaatcaggcctaaacgcatggccagataatagcctttcttaatctccggatactctttaaacaggatatcagcccgttctctttgagactgggtccacaaggattctttcttgtaaagaagatagatgcttcttgccagcagctgcttccgcgtgtctccattagagaaaacgggagcgtgatatatcctgccacaggcttttgcataggcaatctgtgtggattcttcatccaaagcctcccagcgtgctttcacacgcatctcctgaacggcttcataagccagtttctgtacgtggaaacggtcggtaacccgtttggcggcaggaaaacagctacgggcaatctgctccatattgggagccatatccaaggttatctcacgtacttgatagcggcgacggcgggaaagcctgagtaagacagaacttaccgtacagacatctgtgccttttattatggcgataatactgcctttgccaccatgggcagccttgttggtgagtatggtatagagctcaccatgcgaaagggcaacctcatcaatacagacgtaagcaccgatattcttttcaaaaagcagccaatcctgtgcatgagcaagctgatcccagtgaagataaccactcagatgattgcggtattgacgctccagaagagctccgtcaataccatacagagtgcccaataacttacagctaaccggataactatcaatatagctcttttaaaaaagacgcaaaatcctgcgtcatacgggtaccttcagcgaccatacgccagttgcggctgatgtactcattactcttctttaaaatccagcgacgacgacggatattcaggaaaagtttctttccccgaagagggaagtcttgaacaaccacaggatcatagaatcctttgctttcggtttcttggctggaatattgctcaggaacgacattcttttcttcaagataaataacaacctcactagaggtttcctgcacatctacaagatcaaagtaatctaaagttccttcaggaagcagaaggcgataaccattggaatccatactaaataaatttgaaggcaaagatactaatttagaaatttactcctcaggattttacgttgatcccatttccaaaagaaaagattatagagacttcttccacctctttaactccgggaaaaaatctctcattttaatcaatgctgcctgctcgttgaaatcaggatcacctttgaagagttccctcatatgcttcaggctgatattgatcatatcctccatagtgatatcccctgtaaaatctccatctttaaaacaatagatgcaatactcactcataggagttccgtctttatttgttgcaaaatcttctgcctttacaagtggcataccacaactctgacaatacatttcttccatagtaaaactattattcttttaatttatcactatataattaccctatattcttgcggacatttatcagccaattcacaccaaacttatcagtaaacattccaaaataatccccccaatgtgcttcactcataggcatcgttacacgtccctctgttgacaacccggcaaacaatcgatctgcctctcctctactatcagcttctatataaagagagaaattattaccgaatacagtattttgcgccatatagccgcaaacatccgctcccatcaaaacagtctcttcagcaataggcaaacagatattctctattttatttttttcatcctcagaaatcggaggcatcccattctgcggaggaatatccccatatctgcctataaaagtaaaatctataccaaaagctgatttataaaaattgaatgcctcttcgcaattgccattaaagagaaggtaaaaattgatttttgccatttagttacgcttttaagtattaagtctataaagatttatatgacatttatcgtcatgttacaaatataaggttttctttctgatccacaagaattacacttctgcaaattacagttaaacaagtatttatcactaaatcggataaattcagaaagcaaatcagaaaggtaaaaaataccaaagataaacctccgaaaatatttttctcaaacaacacaaaatcacgaaaaaaagcagtagatttgcgccattacaaagtagcaacatattatgcgacatttactaactgctatatttatacttatcaattcgacagtgcttgcctcaaaccaaacacaggcagcagatagcctcctaggtgttttaaaaaacacccagtcttccgagaaaagaattcaaatatacagaaatctggcagacctctatcaggaaaatcctgaagcccatctttatctattaaagatgtaccaggaagcagccacaatcgatgacagaaaaaatatgctgaatgcactcgacgatattcttatcgccggaatcagcgaatacaataaagatacaatagccaaatacaccgaatattttaaaaagatagcgaccgaggatgaactcaaaagtttattacctttttatcatatgcgaacttttgactcacgatgctactccggagagagaacggaagctatcaaagaagaattagattccaagaatgtagagacagataaagaagacaatgtatacaaacaaatagcatcagcctataatatgggaacgagtttctatatgagtgatcaattcaaaaaggcaataccttatttggataaagccatgcaacttgcagaaacactcccggaaaaagaaaaatacatctacaaaaaattcattacctggagagtatgttttacatacgcccaagcaggtaagaacaaagaagctgtgaaaatcatggagcagcttattaatatggtagagcaaaaatacaaaaatgattaccaaaaacagcgtcctttctataatatagatttatatctccttcagtactattcatttatgattagcagtttgccatatctgacattagaacaagaaaaatattactggaagcgcattcaggaaattggtaagggtctgactaatgatctggataaatacaattattatctttgtgccaacaactattattccaataaccgtaccgaaagagattttcgcaaggcaatagcagccaatgacagtctgattaaatttgcagaaacattagcaccacagaatctgcccggattatacaacatcaattccatgacttatgaagcaatcaaagattatcagaatgctctgaaatatttgaagatttcacatctgattcaggattcattaagcacagaagctacacataagcagctcaatgaattacaagtaaagtatgatctgaatactctcaataatgaaaagactatgctggagataaaaaataagaaaacgatgctcatttctctcagcattttattaataatcgtagtacttatctgcacctatttatatttttcctggaagaaggagaaaaggatgaaaatggaattaaaagccttgcatctcaaagcacaggaaagcgaaaagatgaaacaatcatttatcaactcaatctgccatgagatacgtactccactcaacgctatcgtcggattctccgatctgatcatgaatgaagaaatcgatgcggagatgcgcaaagagtttccaccggaaattcaaaagaatactgtattactaacaagtcttatcaacagtatgctggaagttgctaatctggatgtttccgaagaaaaacttccctgtcagcctacagatctgaaaagtatttgtgtacatgaaatgaagcaactcaagaaaaaggagggcatagaatataagctgaagattacagaagaaagtatgattattccaagcaatgcccaatacctaacccaagtaatcgaacacttgctgagtaatgctaataaattcacagaaaaaggtcagatcactttaggatatggagtggataaatccaaagagaaaatcctgatatatgtcaccgataccggttgcggtattcctcaggagaaacatgaagaagtattcaaccgcttctccaaacttgacacttttgttcccggtaatggactgggattatatctctgccggctcatcacaaaacgacttgccggagagataaaaatagatcctgcatataaggaaggaatacgaatgatcgtcactttaccaataaaataaaggtatcggctatattactttattccccttactaataccgcttatcttcaggtaagcgcaagattgaacacctaatagaatcacaaacaaatactcagccgtcaaatagaccggtaaagtcgttgtgaaacaataactcaatagatacaaataagccagatagacgacaatagtggaaatctgaaagataaatgcaatccgggtattacctgtacctgttactgcattcataaaaacataaccaggcaaagcaaatgtgtaattcagcaacatcacgataaacggatactgagcaagttctattaattctgcattatccgtataaaatccgataatctgttgattaaataacatagcaataattatcaaaggaagaccgattgcatatcccaatctgagaattttaccacaaagccggaacatacttctcccctcacccgcacctatcagattactgaccagtgaaccggtagtagccgcaaacgaattgactattacaaaaaaaacggtagaaacacttcttataatattcgacactgccagttgtttttctcccaatcgctcgatagccacgaagaataaaaaccacggagcaacactaatgaaagcatgcatcatactccatacggataagtgaaaaagtgaatttagcaatttcctatcataaacaggttttaaccctaaattctccttatccattttcagaaaagtatagataaccagaattaataaagaaccggcttcagccagtgaagaagccattgctgccccggatatacccagattgagactgaaaataaacaagtaattacaagggatattgataagaaccgccattatagccgcccacgacaaaactctcgttttcgtaattcccacgaagaaagagcggaatgccagaaatggaaaagagaatagcagaccgaaacatctccatgtcagataatcaaccgcagcattataaatctccggtgaacggatgaaatatctcaggataacaggtgacagtatataggacgcaagacttaaaaacatagccagtccacttaggaacaataatccctggaagaaagtcctgcctgtttcttcgtatctttgttccccgtttctgcgggcaatcataacctgtaaacccaaactaaagccaaaaccgagcatataaatggccagataataaacacttgcaagcgcagaagcacctaactccacttcgcctacatgtcccagaaaaatagcatcagtaatattgattaattgctccatcaggatgctcatcatcacaggaaagttgatgagccatatttgcttatacgtataattcattgttcaactaaaataaacgtatgctacacaactatacacatagctgcgtggcactcgatgtaaataatcagataggaaaactctgtgacgaattacaaaaatccgtcaggatagccgaatagcttttattggaaagtactattcgtggagcgtagctatatacagagttgatgtttcatgagttgaacaatcgttttatgtgaattctacacagcaaatgtaggaaaaataataaaaaagcaagtgatcttacccggataaatcaacggttattatatttttgcgtgaaattactccactgcatgaaatcaactgaaatcacaagagaagaaatgtgggcaaagcaacatttgtctgcaaatgaaatcgactatgccatttgggaacaggataaagttgtgctacaacagatgtcccaaatcagcagaagttgctcatttgtagttgatgtttataaatacagatatgctttcgcatcttctaactttgcagatatactgggatatgacagccggaaaatagctactctggagaagcagggagattatttggaatcacgctttcatccggacgatttcgcccgactggagcaattgcagattaaccttagcaagttcatctatagcctgcctcacgaacaaagaaatgattattgtaatatatatagtttccggctgatgaatgccaaacaacagtacatacgggtaatcagccgacaacaggttttagaacaaagccacaacggaaaagcatggctgatacttggaaatatagagattgcgcccaatcagacagaaaccgatcaggtggaatgcactgtattgaatctcaaaaatggagaaatgttctcgcctactttagtatctattccacggattcatctgacacagcgtgaactggagattttacagcttattcaaaaaggattattaagtaaagaaatagctcacaatctctgcattagtattcatacggtcaatattcaccggcaaaacctattgcacaaattaggggtacagaattctatcgaagctatcaatgcaggattaaagtcaggaatactaagctaaccgctctgcgaaagaaatatgcaagttacggcatccagtccataattcccgtaaccggatgcagacttctccattccataaagtcctcataactgcgtatgccatcccggataacagctttataatactctattcccataatcttttccgactcgggcgtatcatatttcaattttaaaatggcataccttgtttcatcggtcaaaacagcggaaagccgttcggcaaacttctcaaaatagccatcataccgggaaccttccaaaatatggatcatatctatctgccagagcgcattatctgcatcccgataccaagcatgccactccacacatgcttcctctgtatccagcagattcttatgctccatcttcatgaaagacttgttttccgtaaacttcaccattgcctgaaagctatcacacagactaaattgtgaggtataaatatgaaaatcaatgtcaagatgcttcatcagcaatcctgtactcaaagaacctactaaatttactctggcacctatactttcccaaatagggatgatctttgtgtcttctataattttccgggctttctgttgattccgtctggcaagatcaagaatatccattgttgttcttttgtaatgacgtgcaaatgtagaaaaaaggacggatatatagctataaataactatttaataacctgataattcggactaactttgccaccctttccaaacttcccagataaaaaattaaaagagttatgacattcaatctatcagaacaacaggaaaaaaagtacttgcaacaggtcatcggcatcattaacgatacgattcagaacaccgatacatcagtcaaagaacatgtagaaaccttacaggaatacaaagattatatctggtcaaacaaagatatcgatccgcatgaaatccgatccatgcgcgaaagcatcctcaatcatttcgcactgggtgaaagcgtaattgacaaacgcaggcggttgggcaaaatattggatatcccctatttcggacggatagatttcgaggaaaagaaaaacggcagtagtgttttacctatttatataggcatacatacgttctatgattcacaaagtaagacgaacctgatatacgattggcgggctcccatttccggtatgttctacgattacgaactggggaaagcggtttatacctcccctaccggtgaaatcagcggagatatttcacttaaacgccaataccgcatccgtaaaggcaaaatggaatatatgatagaaagctcgctgactgtacatgatgaaattcttcagaaggaactcagcagcaatgccgatgataaaatgaagaatattgtcagcactatccagcgggaacagaaccggatcattcgcaatgaagaagcccacgtgctcattatccagggagttgccggatcgggcaagacatccattgccttacaccgcatcgcctacctgctctatacgttgaaagggaatatttcctcaaaagatatacttattatttcacccaataaagttttcggtgattatatctcgaacgtacttcccgagcttggcgaagaaagtgtgcccgaaaccagtatggagcagattctttcgggagttcttgaaaacaaatacaaataccagaacttctttgaacaggtaacggaattactcgaaaaaacgtccttggacttcattgaacggatcaaatacaaatcttccttcgagtttatttcacagctcgataagttcatcctctatatggaaaacaactacttcaaagcagcagaagtaaaactcaccaggcacatcacaattcccgccgaatatattgaagagcaattcaggcgcttcaaccgttaccccatgcgccagcgttctgaagctatgacggattatatcctggaaatgatgaaggtgcaatactactttacaattaccacttcagagaaaaatctgttgaagaaagaaataaagaagatgtttgcaggtaacaacgatcttcagatttataaagagtttttcgtatgggtaggtaaacccgaactattcaaattacgcaagaaccggatgttggaataccctgacttggcacctttggcatacctgcatctggctttagacggaaatattgcttcgtccggtgtcaaacatcttttgatagacgaaatgcaggattattctcctatccaatacaaagtaattcagaaactttacccctgccggaagactattctcggagatgcatcacaatctgtcaacccttatggttcgtcaacagccgatatgattcggaaagcattcactataggcgaaataatgaaactatgcaaaagttaccgctctacgtttgaaatcacggatttctcgcaaaagattcagaccaatcatgaattagaacctatcatacgtcatggtgaacctcctgcaatcctacggtttgaagatgtaaaacaggaaatactgggtattttcagtataatttcttcttttaaaaagtccggttatacgtcactcgggatagtatgcaaaaccgaaacacaggcaagagagctatcagaaagcctccgggtgcataccggtgatatccatttcctgtccaatcaaagttctgcttttatgaaaggtattatcgttacctcatctcacatggcaaaagggttggaatttgacgaagtaatcgttccctatgtcaacgacaagaattacaactcagccattgacaaaagtatgctctatgtagctgtaacaagggctatgcatagactgacactaacctacaacggacgaccaagtgaatttattcctgcctcgtcagatcagaatttttagttctccggttatggaatcaataataaacccgtttatcttaatatccgatgggataagcgggtgtttcctgattaactccacggaacttttaatcgcttcctccacactgtcaaatccattcaaccaggactcaacatccagaccgcagaatttcagcatatcaatgttcttatctgcaatgcctctttccttcatgtgtgcaagcactcttttgctattcaggctttgcgcaccacaatcggtatgcccgatcaccatcacctgttccacgccaagttcataaatggctatcagcagacttctcaccgcactaccaaacggatgggatatgacacctcccgcattctttatcatctttacgtcaccgttctttagtccgagcgcggcaggtatcagttcaagcaaacgggtatccatacaggaaatgatggcaatcttcttgtctgggtatttattagtgaggtatttctcatatcctctgttctgcacgaactccttattgaatttcagaatatcttcaagcatagcagtcttacttttaaaatcgacgacaaatttatggaaaaaaagaataggatgtcattccaataaagctaaagtttattgatatcacatcctcgctaacaccggcaaaaacctattaccacctgccgaatgaccctctgttctgtttcagcagaccggacgaagtgtttcaagcaatggaacctccagtttcaagcaatgaaaccgatagtttcaagtaatgaaacaagcagttccaagtaatgaaactgacagtttcacaccgagaaaccaatcattcggtaagggattccagtttctttccagaatctccctttacctttgcaatatcagaataaaccaaagtattaattattaaaaatagaagaatatgaaaaagttagttttattattagtatgtatgttcacaatgcacacaatggtaatggcagataatgacaaaccgatccaagtaaatcaactccctgcaaaggctcaaactttcctcaatacctactttaaagatcataaagtggcattagcaaaacaggaaacagaattattctataaaagctacgatgtggtcttcactaatggagaaaaagtagaattcgataaggcgggagaatggacagaagttaaatgccagcaaagtgaagtccctgcacagatcatcccggaagcaatccgtacttatgtaaagacaaactatccggacgttaaaatcttacagattgaacgggataaaaaagaatatgaagtaaagctgtctaatcgttgggaaatcaagttcgactctaagatgagagtaattgacattgatgactaaaataaaaaaacagtaaatcatcgaataggaggaagcggtgtttcctcctattcgatgatttactgtttttttattttaagttcccgacccgtttaatgttacttccgatagaaatcaaatgcaatggcacaatgttttgtcataaagccacaccgctccagcgtcctgcgtgaagcaacattatcagccgcacaccctgcaataggagtatatcccgcttttaagcatgattctttaagatgtgaaataatcattgttgcatacccctgcctgcggaatgccggatttacccacattcctacatcaaagatatcttttcccggaagtacccgaataagatagccgcatcccaaaagtgctccatccttttcatacattagtatcatccggtgcgaaacggtataatttaactcttcgggagattcatataaatcactgtcgtgagtaagcaataacggaatatcaatctctttcgccttacgaacggttaccctgtcctgcaaaggcatcactatctcatcagtgaagaaacggaatagatagccacctatttcactggattgacaatatgcatggcagcaagccataaacaaatcatcaaacgacttgcagaaagcactcttaatctgaaattctttcaatactcttccgaatatttcttcttttcgtgaaagcagttcatcagacagatagaattcaatcagctctccttcttccgactgaatgaaataccccactctttcttcatcctgttcgatacagaaacaagtgccttttgcaacaagccactcgcagtgtaactcctgggggtaacgcaaagaatccagatattgatttctcagattcagaagtgatgccaatggtacagctctaaattcaatcataattccgtttttgctaaagatacgaaagttttccggatacgaaaaattactttactaaactgatgtattccccatatccttcagcctgcatcttttctttaggaatgaatctcaacgaagcactgttgatgcaataacgcaaaccacctttatctgccggaccatcagtgaagacatgtcctaaatgggcatcacccgtaacacttcgaacctctgtgcgtaccataccatgagaagtgtccatcttctcatgaataagtttacggtcaatcggttttgagaaactgggccagccacagccggaatcaaacttatcagttgaaacgaacaaaggctcacccgtggtgatatctacataaataccgggacggtgttcattccaataatcattatgaaaagccggctcggttgcattcttttgagtcacggcatattgctccggggtgagtttagaacgcaacaccgtatcatccggtttactataaacagattttttcggcattttagccttacgcgccaagtcaaatagttcaggatggatatgacaatatccgcccggattcttatccagataatcctggtgatagtcttccgcgggatagaaattcttcaaaggctttatttctactgccagcggacgggagtaagctgctgccagacggtgcacagtttcttgaataaccgctaaatcagccgggtcagtataataaatacccgtacgatattgggtacccttgtcattaccctgcctgtttacgctagtagggtcgatggttttgaaataaagatctatgagaaaaggcaggtccactttgaggggatcatactgcactttcacggtttctgcaaagtccgtagttccggtacatacttgtttataagtcggattggcaatattgccgtttgcatagccgacttgcgtagtttctacgccatcaattagtttcaggaaatgctcggttccccagaaacagcctcctgccagataaatttccttggttgattccatatcttttttcctttctgcctgccctgcctgattattggcacaagccagacaacttattaacaatacaaatataagttgtttcatatcttcagctctccaacaaatcttatgctattgatatatgaatatataacaatcaaaccgataggatagttgaacacaagagactacaatatagcgctgcctgtattctcttctataaaagaggtgcgatccggctcatagtttatctccgccttccgggcctgcgagtgctgaaattgtcgggctactttaaactccttcccttctttcaataaataagaacctgtctgcttaaaccagaagcccacattagcttctatacattgacgacgaatctccaaaacccagtcataatcgcatacacgcgcctcccgtccagattctcctccgactacaacctgctcaacccactcacctaactctcccctgaaatctatccggctgagaagcggttcgcaaataataattttatgctttatgggagctgccttataaataggcaggcgatagtcaatccgatcctgattctccatcgtacaacagattgttacattatcatatccttctccccaatctgagggtaaacaatccttcagtcggtcaatacgcttagtgataaacagaaagtgaagatcttgtctcaaccgcatcatctcccatgcttcaggacgccattcatcagcatcttccaccagaaaatcagaagtgaaacatgtatagaccagattaccggaaggtatcttgaatgttttgtttttcttttgctgcacaggcagattgaacttctctgtctttgccacaacggaactatccttaccatatttaccatctgtacgataaacatagcaatgctgacagcctgtactaaacttatgacagccatgccagggattccacatcgaagtctttacacctattcgcagcatatgttcattgtctccataactctatgtctttattgttgctttcacaaagttatgcattgcccttattccaggcagtattcgagttcttttttatggaacttttacatgcgcttatgaaaagaagcatgaaaaagaaaaagggactctgcaacatttatgtcgacagagtccctttttctatattgccaataaactaattcattgtcgccggtgtcttcagcttcacatctgcccaatcagaccatgtaggagaaaccatatactgaggttcctgcatcttgccaatcaaagcagtagctttcttcacctctgcattggtcttttcaaacagttctttcatggttaaatctccctttgcatccttgatacatttaaccaggaagtaagtataatatccctgcttcttatcatgataaacactggaagtctggtcaccgctactggatgagaaactcaaggtatgtccctgtggcaaacccaccttcggtactacacgcacccctttttgggccagcaacggagcagcactcttatagccaccactaaagcaagcatccaggaaaacataagctcccttgataggataagttgccagacgcttatataaatccgccagagaaatacccagacgaatgttcttacccgtaatatctaccggcagcagataaagttctttcgttgcctcatcattattaccatgaccggaataatagaatatcaattccgcttcaggatcagtacttgccatattcaccaaccagtcaagctgttcgtgcatcataccagccgtagcattcggaacaactttcagttgtccatcaggtacaccaaatgtacgtacacaatattcacggaataccatagcatcattcacggcataaggcacattaatctctgcattggcaccggttatgctataatcttcgttaccaatgatcaatgcataacggtgacgattcacagcacccacaggaatatcttgcagcaactcagtattgagtcctaaactaacattcttaagatcaaccgccttacggacagctccgtcaatcttgattgtgctggatgccgttaagtattcacccaccttcaccttataggcttcactcagataagaagaacgggaatcttcactcacgcttaccatcacagcgattgaatcaccatcgaaacgcttgttcaccaggaaaccataatccagtgttgctacatcacccggagcaatactatcaatcgtcatttcaggtacatcagttgtaaacacattattcggcaacttgaagttcaatttcacattacgtgcagtcttcgaaccgaaattctgcaaagcaagcgtcagcttaccattcttacctaaagtgatagaagaaccttcggaagcaaagaactgatgatccgccacacgcaggcgcggcatagcatattcctgtgtattaacaatcaattccgacggatcagcatcaaaaccattcgcttcaaatgcatagatattaatcttggccagcgctgacggcatttctttctttaccagataacggaaagtgtattgcttcgatgttcctgcgggaatattaccaccatccaactcacggggaccgtcgaaatattcatcatatccctgttgttcggaaagacggaggcggatgttataagcatccccctgtcccttattctcaacagaaaattgaacagcaaaactttcaccggcatctattaccttattattattaccatcaataaaactatccacatggatgaccaacatagcaggttccaccggcacaggagcagattcctgttgctgtgccaccccttcagtcttcttcaatgcctcattataggccagcaaacgggatgggaaagaagtatatgaagcaccgtcagtaataattttcatcaagacttcatactcagatttcatatccatatactgatatacacccgccaacccctgcatatacattttagatgaaggttctttttccagaattttcaggaacaggtctttagcatccagcagataaccggaagcacgctgacgtaccaacgcatattcggtatcattagcaatagtagcaccgttattcacaatttcagtagctacattgaaattaacacgtgccaatccggtgagcaactcaaaactatcgggatggagagcatacaaacgtttgtagatatcaagcgcttcctgattctttccctgacgttccagaatacgtgccttgatgggcaataccttatcattattgggatcaacttcaagaatacgatcgatggccgacagtaacttcggcatattgttcgtggcaatatgcacattcaccagattataaaggaaatcaagcgaaacaggatacttggctatggcttcctccaaaacacgttcctgttcagaataattcttctgcgactgataaatcatattcatatatacatagcagtctttctgctgtgtatccgttcccgtgcttaaatactcctggaaatacttcaacgcctgcgaatacttttggagattgtaggcagataccgccgcataatatactacagaagcatagcggttatccttgggaagcaactcgctctgaaaaatcttcagccggggcatctcaatataagctgccgcaaaatccagcgccttagagggttgcttctgttcggaataatacactgcaccattcaacagataaggatacatagcacgcaaacgattcttggcgccactcaaatactgaccgttatccggtgcttccacaactttcatgaaattctcgtaactgtccagcaaatagctatacatacccgtcacgttcgttcctttatcgcgctcactttcaaaaagcacatattgttggttagcacgcttagaagcagcagcggcatcctgtgccactactctcccatatgctcccaacattaaaatgattgtcagtactaaaaaattcttcatatttatttattagctcctcactaaattattttgcaggaaaagcatccatgattacaaactctacgttaatcttacggaattcaccaccgcgttctttggctacttccacatgatattcatattcgttcttggtgttatccagtgtggttacattcttttctatataattcttcacacctgccgcacgcatcaaagccaactgttcattagcagtaatgcccgaagcctttgttacggtaatattatcaagattaccatccttataataaggttcatcgataaattcgccatattgtccgttataggcaatgcgtccacgaataggacttgcatcggcagaaccggtaacaatgaccttcacttgtttaccttcagacagatacttggaaaaatcgccttcaaaagcattcttgattatcttcatcagagacattgcggcattggaacgttcaatatcataaccacctgacgggaagtcctcctttgcagaaaactctttattgatcacctcatactggtagcccactttgtagttcagaatcttattaccattagcatccacacccggaattacttctgtcctcacatcaatctgtgtattttccgtaatcagcttatcctgcttcttttcttcgattacagcttctttgatctccttcagctgaatttcttcacgacttgcctgctgcataatttccagcggaacaaagttttcatctgcttccagtgcggtcaacttggtgcgaccgatattatcataaatatagaccttatttgtagtctcattacgcacttctacataagccaactcaaattcgtccttatcattcaatacataaaccgcattatcaaatttcaggttcttaccatccttaaagtcgcctacttcatttgaaggcacttccaaagcaatcgcgggcaatgcattaaatccgatgttcagcatattcttggaagcgtcatattctcccacgaaaggattatcaatagagatgcggtcgcctgccaactccgttgccacttcctgagcaaacaattgttgttgcttcaggcgagtctcgtcattcacacggatagcataatcttccatggactcaccctgcatcatcttcacccactcgttcatcttagcatccacttccttactcatcaatttaccaaagaaaggattcaaaccattagcatcccagaacacaagtcctttggcgcgattggaaagcatgaatacatcgctcgtttgcttgtttacaaagaagcgactacccgtcacaccacccggattttcatccaatgtctgttcaggcacactgtttttcaagttcatgatgacaatagcgttaccatctttaaccacactgatatatttgccatccggatgaaaggacggagaagtcagtgttccacctatcttatcaaagatatccaccttatcccatgtctttgtgtcgaaaatagtcagacgcttgtctgccgtcacaacagccatttgagaagcatcggcagaaaagaccaattcagttacttcggcaggcatcggaagagaagtacgcagttcttttgtctggaaattccagatatcgatattcttaccggttccggcagcaataaaatagttgttgggactcatagtaatagccgttgcgacagcttttccctgaatataagcctgaggcaaatatgcttttgtgtcgtaaactatgatttctcctaaagaattggaaaccaaaaaattgcgtgcatcagcaccatagcacatggcaacagggacaatgtctccctttgatgcatctttcatcaactcagcgcctacaggtccgggcacaaagaaattcagattcttcctgcccttcagttccttgctcttacgctgctctttcagttcaaaaagttttttgttccggtcacggaaagaataaatactaacaggtttcttcccccgcatcaaagccaatgagctacccgtagggttaaaggctattttatcaacatctctcagatcgacaatagggatatcgcgaatcgtaagcaaagaaccatccgacaggaaagctgtacaaaacgttgtattgtcaaatgccgaaatacgtttcgctgaaggaaaactccttttcacctgtacctgcgccattgcctgactgccaaagaaagcagccacaatacaaaatgcaatacccttgaccgggcggaaccacattctcatttcatccatatctttaatgtttataatagtttatgtttcatactatttgcaaatataaacattaaattcctatcaagcggtcaacaaattcctgttttttttgtttaaggaggcttttaacaggataaacaggtaaaaaacaagattaagaggatcaaaaagataactatgcggaatatttatttgtcacggaaatcagtgacaaatattaagaatgtttcaatcccatcttttcagcacgctgcaacataaaagtgcgtgcagcctcgtattcattgggtatcactccatccaaaatagcatctttaatggcgcttttcagagttcctacttgctggcagggttccagattgaaagttttcatgatttcttctccactgataggtggctggaaattgcgaacgcggtcgcgctcttcaagatccttcagtttctgacgcaccagttggaaattattaagaaaacgttgtttgcgctccatattcttggacgtgatatcagcttcacacaatgtcatcagatcatcaatatcatctccggcttcaaagagaagacgacgtactgcagagtcggttaccacatcatcagcaatgacaataggacgcatgtgcaaacttaccagcttctgtacatacttcattttttcattcatcggcaatttcattctccgaaaaatctccggtaccatcttctcaccaatgaaattatgattgtggaatgtccagcctgcacgaggttcccaacgtttggtaacaggttttgctatgtcatgcaacagggcagcccagcgcaaccaaagattatcggttttgcgactgatattatcaagtacttccaaagtatgatagaagttgtccttatgagcccgtccgttgcgggtttccacaccttgcaatgcagcaagttccggaaaaatcagcggcaacagtccggaacgatccaaatcaataaagcctttggaaggaactggagagagcaatatcttatttagttcctccgcaatacgttccttagagataatagaaatacgttcacaattgcgacacaaagactcgaacgtagcatcatcaatatagaaattcaattgggtagcaaaacggatgcaacgcatcatacgcaacggatcatcactgaatgtgatatccggatcaagcggcgtacggatagtcttttcttttaaatcctctatgccaccaaaaggatctaccaattccccgaaacggctttggttcaaacagacagccagtgcattaatagtaaaatcacgacgattctgatcatcttccaacgtaccatcttcaacaataggtttacgcgaatcacgttgatatgattccttacgcgcacctacaaactccacttctgtcccacgatatttcacctgtgcagtaccgaaattcttaaatacagctacgtgcgctccacgccccaaacatttgcccaatgcttcagccatttctataccactgccaaccactacgacatcaatatccttagaagggcgttgcaggaaaatatcgcgtacatatccaccgaccacatagcattccaatcccaattcatctgccgtctcggatatccgtttaaatatgtcgtcactaaaatgttgtttcaattcttctgttgtcaactcaaccataatacatctttaaaaaataatcatatagttttcattccggagagtagaaagtctcttggtctatttttccaccttccatgtatccgaaccgtgtcatcctcgtatttgctccgtacctatacgtttggacttggtacggaccaggtacggctttgatacggaccgggtacggtgaggacaaataattgttccaaacatccgatatcttaagaaaactaaaatacaatttatctatatttgaggctgcaaagatacggatattatttataattttgtcctcactaacagaagaacaacagttatgaagacaatgatacttcttgcgtgcctctgttgcacgctcttctcttgcgagaatgtggagaaaaaagccggtgaaaaattgcaaaccgcccgtgaagcttttgaacggggagacttcagtgaagcaaaaatgcagattgacagcattaagatattatacccaaaagcttttgaaactcgtcgtgaaggcatcagtctgatgcagcaggtagaactgaaagaacaggaaaaaacacttgtttacctggatagcctgcttcaaaagaaacaaagcgaattggatgccataaaagggaaattcaccctcgaaaaagatgccgaatatcagaaaataggcaactatctgcacccctcacaagtaatagaaaaaaatctgcatcgttcatatctccgctttcaagtaaacgaaaccggacaaatgagcatgacttccatttattgtggtccaagcaatattcaccacatcagcgtaaaggttatcgcacccgatggtagttttgctgaaacacccgcctccaaagatagctatgaaacaactgacctgggggaaaagatagaaaaagctgattataaaataggagaagacggcaatgttatcggtttcctttatctgaataaagacaagaatattaaagtgaactatcagggtgaacgcccctactccactacaatgactccggcagaccgccaggcagtggccagtatttatgaactggcacagttactttcatctatcactgaaattaagaaagagatggaagaagcaaatctgaaaatagagtttgtgaaacggaagatgcaggaaagggaagaaaaagagacggaacaaggaaaataaacaaattaaagaaaccattaaaactcaagattgttaaaactacattcggaataatatctataatcgaaagcaaaaataagagttttgcaaattctttgtaagtttgatttaagagtccaacatctatttatttttcagatttcacatactatatatacgatgtaggatagcatcctttatgccttttgatctttatttctatctttgtactgaaaaacaatgtcattcattatgggaacaccttttgtatatggacgaatagccgataagaacaatttcacgaatagaaaaaaagaagttgaactgctcaagcgcaactgccgtactgaaaataagccattccgtatgggatgatttcgccgcttccgtccgaaaatatttggggcgactactaccttttgtcacattctcagatatggctcaaacatgcgaattatctttcggacttgatttcaaagacaataaaatgacatttgatgaaatcttggatttgccacaagccatcagtagggattccggcaaaaagatggtggtttgtatcgacgaatttcaaaatatcaacgagtatgacgaccctttggcatttcagcggaagctacgctcgcactggcagaaacatacggacgtatgctattgcctgtacggcagcaaaagacatatgctactggatatttttcataattacaacatgcctttctataaattcggggacatcttatttctggaaaagatacccaaaaaggattggatcgaatttatcggaagaaagttctctgaaaccggaaaggaaatttcaggagaattatgcagcatgattaccgacctgataaagaatcacccctattatacccaacaattaagtcagcaaatgtggtttagaaccgcgacagttgcctcagccgaagtagttgatgaggctttcagtgatattatcgggcaacttagtttgctttttgccaatatcatcgatacattgacaccacggtaaataaattttctactggcagtagccgatggggttacaaacttctcatcaaaagaagtactcattaaatatcagttggggacatctgctaatatcaaaaatctaaaaaaggcagcaactgaaaaagatttggttgatattttaccgggaaaccggatagaactacaagaccccgtatttgaacattggctgaaacatatttatcgcacgagatgaaatcgttaaagtcccgaaaacaaggttcttttccattgtaccaataatatgcgctaagaagcattcttatagagaataaaaagaaatatcttcctaaatattataacgaacgcgggacaactacattaagaagtcatcccgcgttcgttataatataatttatgccatgaaaattctattaccactgcaaccgtggcaagaacttactcaagcaagtacgtaatgcactcaaggtaataggctttaccaatacttccgaagcaccggcagccattgcattttcacggtcagccgtaaaagcataagcagtctgcatgataataggaagttctttctcctcttcacggataatctttgttgcttccaagccattcatgataggcattttgatatccataagaatagctgctgtctttccacggttctctttgaacagattaaccatctcttcaccgttcttcgcccacaatatctcgcattttttgccaataatagcctttatcaacttaaagttactatcatcgtcttccgctaccagtatcagcggacggtaatcttctgataaattccctgtttccatgaccaatgtatttttgtttaatgaggcaaagatataaaaaataatataaatatattatctttggagaagatatgctgcatctcggcataaaaaatgcacgagttcattttattctgtactcggtttgcactatctttgcgcctcaatttaaaaatagagtatgatttcaatagacggactggccgtagaattcggcggcaccaccttattcagtgacgtttccttcgttattaatgaaaaagaccgcatcgccctgatgggaaagaacggagcgggaaaaagtaccttactgaaaattctggcaggagtacgccaacctacccggggcaaaatctcggcacctaaagacagtgttatcgcttacctgccgcaacatctgatgacggaagacggacgaaccgtattccaggaaaccgcacaggctttctcacacctgcatgagatggaagcagaaatagaacgcctcaacaaagaactggaaacacgtaccgattatgaaagcggcagttatatggaactgattgaaacggtttccgccctgagtgaaaaattctactctatcgatgctaccaactatgaggaagatgtagagaaagctctgttagggctcggcttcagccgcgaagatttcaaccgccagaccagtgacttcagcggcggatggcgtatgcgcatcgagcttgccaaactactgttgcaaaagccggatgtactgttactggatgagcctaccaaccacctcgacatcgaaagtattcagtggttggaagatttccttatcaataatggtaaagctgttattgtcatcagccacgaccgcaagtttgtagataatatcactacccgtaccattgaagtgacgatgggacgtatctatgattataaagtaaattattccaaatatctggaactccgcaaagaacgtcgtgaacaacaacaaaaggcttacgacgaacaacagaagttcattgccgaaaccaaagaattcattgaacgcttcaaaggtacttactccaaaaccctgcaagtacaaagccgcgtaaaaatgttggaaaagttggaaattttggaagtggatgaggaagatacttcggcactacggttgaaatttccgccatccccacgttccggaaattatcctgtaatcatggaaaacgtaggtaaaacctatggcgatcatgtagtattcaaaaacgctacactgaccgtggaacggggagacaaattagcatttgtcggcaaaaacggcgaaggtaaatccaccttggtgaaatgtatcatgaaagagattgaacacgatggcacgctgacactcggacataatgtgcaaatcggttatttcgcacaaaaccaagcttccctgctggacgaaaacctaacggtattccaaacgattgatgatgtggcaaagggagaaatacgtaataagatacgtgacctgctgggtgctttcatgttcggtggaccagagcaatccatgaagaaagtgaaagtgctttccggtggagagcgcacacgactcgccatgattaaactgttgttggaaccggtaaacctactgattctggatgaaccgacgaaccacctcgacctgaagaccaaggacattctgaagcaagcgctgttggatttcgatggtacactgattgtagtaagccatgaccgtgacttcctggacggactggttaccaaggtctacgaattcggtaataaacaagtaaaggaacacttaagcggcatctacgaattcctggaaaagaagaagatggagtcactccgcgaactggaaaggtaaacgttccttaacagggcttccgcaacttttcttgcgtcatattgtttcatttttataaaactctaattacgagaacaatgaaacgatatgacgctataataataggcttcggcaaaggtggcaagctactggcggtcgaattagccaaccgcaactggaaagtggcggtcatcgaacgttccccggacatgtacggtggaacctgtataaatgtaggatgtatccctactaaaaccatgataaacgaatcggaattcgccgaacgtatctatcaagacgattataagaaacaatccaagttatattccctcgccctaaggcgcaaggataagttagtcacctttcttcgagaaaagaacgtcgaaaatctgacgaataaccctaatataacattgtatgacggaactgcatcttttctctgtccagacacggtaaaggtagttccttcaccggaaagtgaagattactttgaactggaaggaaaagaaatctttatcaataccggttctacacctatcctacccgatattgatggattaaaaaacagccgatacatatatacaagtgagacattgctgcatagcgagatccttccccaacacttgctgataataggaagcggagccatcgggctagaatttgccaccatgtatgccggattcggcagcaaggtcactattctggaagccggtaaacgcttattgccgaaagctgatcgggagattgccgaatatatgcaggaaagtctgaaaagaaaaaatatagagatacgtctgaatgcacgcgtacaatccttacatgatacagcggaccgcattaccgccgcctatacggatgcctcggacggcacaccttactttcttgaaggcgatgccctactcattgcaacaggacgtaaacctatgatagatgatctgaatctggaaaaagcaaaaatacaggttaatgcacaaggagggatcattgtcaatgagcaattacgtactactgcaccacacgtctgggctttgggagacgtcaaaggtggggaaatgtatgattacctttcaattgacgattcccgtatcatcttaaatcatcttttcggtaataaggaacgttctgttgatgaccgcaatcccgtaccttacgccatcttcacagatccacctatggcacatattggtctgacggaagaagaagctatgaaacgtggatatcccatcaagatttcacgtctgcccgcctccgccatccctcgtgcacgtactttgcagaatatggatgggatgctaaaagctattgtaaatacggatacagagaaaatactgggctgctcactcttctgcgtggatgcaccggaacttatcaatctagtagcatttgtcatgaaaaccggacagaaatcttcggctttacgtaacttcatattcacccatcccagtatgagtgaaggtttaaatgaattattcaaggctttttaataactaacatttggtaattaagccgttaacttctatctttgtccgcaataaaaaaaataaggatgcagagaaaacggtacataacattcttttttatattcatcagcatggtcatgctggtggtaccggttattcctcaccaccatcacaataatgggttgatatgtatgaagaatgacataactcccaattgttgcggacaacaacacaccccggatagcgaacattgctgttgcgatacgggatgtgttactactcactttttccagcaaactcccagctcggacaacggatggacacatccggattttccactggttatcacattattctccgaaccccttctcagactattggtcctccccgaagaaagcgggcaaagacaggactgcatataccaggagtcacttcatggcacgtatctcacacgtgccacaggacttcgcgcacctccgtgtgttcttactttatcgtaaagtctgcaactttattgcaggcttttatctctaattttgcacacagataaaagtaagaacattaaaatatcatcatgaaaaaaattctttttatgggagtcatgggattattcctgttaggctcttgcaatagtaaatccggcgacggacacgaaggtcataatcatgaaacagaaaaacatgagcacgaaggttgtgatcatgatcatgaaggcgaagaccacaatcacgaaggtgacgaacataaccacgatggacatagccacgatgaacaaacagcggccggacatagtgacgaaatcattctacctactgccaaagcacaggctgccggagtaaaatccaatgttgtagaaccggggattttccatcaggttataaaaaccagcggtcaggtaatggcagcacaaggagatgagagcgtggctgtagcaaccgtagctggtgtagtatctttccgtggaaaggtaatcgaaggtatgagtgtcagtaaaggtacaccactggtgacattatcttccaagaacatggcggatggtgaccccgtagaacgggcacgtatcgcttatgaagtttccaagaaagaatatgagcgcatgaaagctctcgtaggaaataaaattgtttctgaaaaagatttcgctcaagcggaacaagcatacgaaaatgcacgtatcagctatgaagccgtagctaaaaatagttcagcaagcggacaagcggtaatttctcctatcagcggatatgtaaaaagcctgttagtgaaagaaggtgattatgtagccgtagggcaaccgttagtcagcattacgcaaaaccgcaaattgttcctgcgtgctgatgtatctgagaaatattaccaatatctgcgtactattggttctgctaacttctgcactccttataataataaggtatatacattgaaaaatttagacgggcgtcttctctcttatggcaaggcttccggtggtgatggtggatattatgtacctgtaacctttgagttcgacaacaaaggtgatattatccccggttcgtttgtagaaatcttcttattgtcttcccctatagaaaacgtaatatccctgccccattcagcattgaccgaagaacaaggcagtttctttgtctacctgcaactggatgaagaaggatataagaaacaactcgtgactctcggagccgataacggtgaaagcgtacagattctctcaggtgtaaaagccggagaccgcgtggtaaccgaaggtgcttatcaagtgaaactggtaagcgctacgaatgcgataccggcacacagccacgaacactaaacttatttactatttgacaagttactatttactatttggctgcgcaatgcgtgaagctgatgataagaatagtaaatgtcaaatggtaaaagacaaggtgtatcaaatagtaaataataaatagtaaaatagtaaatatatcatcgtgttaaataagatcatacatttctcacttcataaccgcatcctggtacttgtagcctcggtgttgttactgataggcggaacctacaccgccatgaacacggaagtggacgtattccctgacctcaatgcacctacggttgttatcatgaccgaagcaaacggtatggcagcagaagaagtggaacaactcgttacatttcctgtagaaacagcagtgaacggtgcaacaggtgtgcgccgcgtacgttcttcatctaccaacggcttctctgtagtatgggtagaattcgattgggatacggatatttatctggcccggcagattgtcagcgaaaagttggccgtcgtaagtgaaagcctgcctaccggtgtaggtaaaccgacgctgggcccacaatcatccattctgggtgaaatgctgattatcggatttacggccgactctacctccatgctcgacctgcgtacaatagccgactggaccatccggccgcgtttgctctctacgggcggtgtggcacaggtagcagtacttggcggtgatataaaggaatatcagatacaattagacccggaacggatgcggcattacggcgttacgctgaatgaaatcatgactgtaacccgcgaaatgaatctgaacgcaaacggtggcgtgttatatgaatatggtaacgaatacattgtgcgtggagtactttctaccgaccgtgtagatcaactggcacgtgccgtagtacgtggtggaactgcttcgggaaatgctcctatcttactggaagacattgcagatgtacatatcggagcaaagttacccaaactgggtacagcatccgaacggggtaaatccgccgtactgttaacagtaaccaagcaaccagccaccagcacactggaattaacggataaattagaagcatctttaaaagacttgcagaagaacctgccaccggatgtaaaagtcagcacagacatcttccgtcagagccgctttatcgaaagctctatcggaaacgtacagaagtccttgtttgaaggaggtatcttcgttgtgattgtcctattcctattccttgcggatgtacgtacaacggtgatctcattggttacactaccgctttcattgattacttcactggtaacgctgcattatatgggcttcacaattaatacaatgagcctcggtggtcttgccatcgctatcggttcgctggtggatgatgccattgtagacgtggagaatgtatataaacgactccacgagaataagttgaagcctgtggaagaacgcctttccatactggaagtagtattcaacgcatcgaaagaagtacgtatgcctattctgaattctacgctgattatcgtagtcagtttcgtaccactgttcttcctcaccggtatggaaggccgcatgctggttccactgggtattgcattcattgtagcactggcagcttctacggtagtggcattgacagttacaccagtactttgctcctatcttttaggaagagacaagaagaaggaacagaaagagagcagcgactcgttcgtagcacgcaagatgaaacagtggtatggtgctgcattggcatttgtactgggacataagaagatcgtactgggcagtacaatcggtttgttcgtagttgctctggtatgtttcttcacattgggacgttcgttcctgccacctttcaacgaaggttcgtttacgattaacatatcttctttaccaggcatctcattagaagaaagtgacaagatgggacaccgtgcagaggaattgctactcagcattcccgaaatacaaaccgttgcccgcaagaccggacgtgccgaactggacgagcatgcacttggtgtgaatgtttcggaaatagaagctccgttcgaattgaaagaacgttcacgtagtgagttggttgccgaagtacgcgagaagttaggtactatcgtaggagcaaatgtggaaatcggccagcctatcagccaccgtatcgatgctatgctcagcggtacgaaagccaacatcgcaattaaactgtttggtgacgatctgaaccgtatgtttaccttgggtaatgaaatcaaaggtgccatccaggatattccgggtattgccgacctgaatgtggaacaacaaatagaacgtcctcagcttatcatttcgcccaagcgggaaatgttggctaagttcggtatctcattaccggaattctctgagttcgtgaatgtatgtcttgctggtgaaaccgtatcacaggtatacgagaaaggtaaaagcttcgaccttaccgtacgtgtacgtgatgatcttcgcgacgaaatggagaaaatacgcaacttgatgatagataccagtgacggaaagaaaatacctttgaactacatcgcagaagtgcgttctgccatgggaccgaatacgatcagccgcgagaacgtgaagcgaaaaatcgtaatctctgccaatgttgccgaccgcgacctgcgcagtgtagtgaatgatattcaggcccgtgtggacaaggatattaaattgcccgaagggtatcatctggaatacggtggccaatttgagagtgaacaggcagcaagccgcaccttgttactcacatcattaatgagtattgcggtgatcttcttactgctttatcatgaattccgtagtgtaaaagagagtgcaatcatacttatcaacctgccgcttgcattgatcggtggtgtgtttgctttgttgatgacaacgggagaggtgagtattccggctattatcggttttatttcactattcggtatcgccacccgaaacggtatgttactgatcagccactacaaccatttacaacaggaagagggaataaacgtgtacgatagcgtaatccgtggctcaatggaccgtttgaatccgattttgatgacagcattgtcttcggctctcgctcttattccattggcactgggaggagatttgccgggtaatgaaattcaaagtccgatggcgaaagttatccttggcggtcttttaacttccacgttcctgaacggtttcatcattccgattgtttatctgatgatgcaccctaaaaaacaaccattaacaatatcaaacaatgaaacgaattctcatatttagttttatcacttttttcctatatgcgggaatgcgtgcccaatcggtcggcatagacgaagtgctgcaccgtattgaagcaaacaataaggagttgcaggccaatgcgcaactcatcacttcacagaaattggagaacaagtcggagaacaatttgcctgatcccactctctcgtatgcccatctgtggggatcggaagataagagtgagacgataggtgaacttgttgtttctcagagctttgatttcccgaccttgtatgctacacgcggaaaagtaaaccggctcaaaaccggtgcgcttgatgcgcagtctgccgccttccgtcaacaactgttgttgcaagctaaagagctttgtttcgacatcatcatgttgcagcaccagcaagtgattctgaatgaacgtatgaaacaggctgaggaactctctgcatactataagaaacgtctggagacaggtgatgccaatgtattggaaacaaataagatcaatctggagttactgaatgtacgcacagaattccgtaccaatcagactgcgcttgataacgcctggaaatctctctttgcactcaacggagaccagtctttgcaagataatgagctgagcagtttccgctccatcaacgactatccattgccccttcttcctaccgactatgaacagttacgttcggaagtgttggcagccgatcagactttgctgtcattaagcagtgaaagtgctgccgcccgcaaacagatttctgcaagcaaacaaggttggttacctaaattggaacttggatatcgccgtaatacagagtccggtactccatttaatggagttgtagtaggcttttccttcccgctgtttgagaatcgtaataaggttaaaatagccaaagcgcaatctctgaacctcgattatcagaaagagaatgctgctttccaagccgaagcaaccttagcaaaactatacagcgaagcacaatcattgcagacttccatccaagaatacagggaggcattcagttcacaacaagatcttgcattactgaagcaagctctcaccggtggacaaatcagtgtgatagaatattttgtagaagtttctgtgatttatcaaagtaagcagaatctacttcaattggagaatcagtatcagaaggtaatggcacagatatacaagagtaagctataaaaatattattcttgtatcataaaagtaaagcgaagaatcggttcccacaattgaaggagttgattcttcgctttctttataaatatcaaactatagttctgtaatctttcccataaagaggatggctcccgtactcttttccttaaccataaaggcaaaaggacgattcacaaagaagggaacaggagaaggaaaaccgacagcattatcaaacattcctcctactgtaaccgcagccgcttcggtaccttcctcatccacatttatataagtaaactgttgtagaaggccaatatatagttctgcaccggacatattggcaaactttgctttataagcatcgaaagcatctttcatccccatagctatcatgtcctcttccagctctttgtcatattctactttaaaacgaggaagtttaatttgtagttcttttcctaccatattcttactccactgtttccagttctcataattcaggctgggtaagctttcatccaaggtcttatctccggatggcaacagtatcaccatactaaaagcttcattgccatagggtaattccgcaatagagaaatcatcagtctgggtgtaattgaacgttgcggtctggttcatcatagctactttctgctgactgccgtcaacattggtaaagttatcctgtccagtagccgacttatcaaactggcttttccagatacctttaaaatagagtgcattaatcaaatacatacgaacatccgcaggtatttcctgaataacctcctttatacaattattagtctgagtggcgcaccattggtttatcatatctttggcggtcggagatgtgaaatcaagttcttgcacctgagcatcgtacattttcttatttacatcaacaaaagagtcataaaccttaaaaccttcctctatccagatagaattagctattccgagttgagttgtattgtccaaatccaacaaagctgaagttaacttttgattatagttgttcagatcatcaagagagaaagtattggcagggaatcctaatacatcctgcatctcagcaagcgtattatcagtagccccgttcgtaatcatggataaacaaagtgatgcactcaatggagacacaaaaacattcggtttttctttttcggtactgcacacctgatcgaagaaacggaaagcaaagtctgtacctttgtccataaactcttgttccgcacgggtaagattgatgtcttgacgtggtttaggttccggttgagaaggattctcatcattctgacaggctgcaaggatactgagtaggcttagcgcagcaatagttttctttagcataagcattatagtattagttttctattaagttactctgttagaataaatgcataaatttatgaaatactgcatcctataataaataaaacataaatctttcctatctttgcctttcggttttgttgaagtatgcctttcggtatgcttcatgaaaagggaattgggtgtaactcccaaacagtcccgctgctgtaaactcattgtcaaggatttaccaatcacctatgccactgccggtattcgcacggtgggaaggcggtaaatccggagtaagtcagaagacctgcaaaacctatcaaattttatgccttcgaggaaagggcatgagatacttatatttttacagctatttgttatgatcaaggataatccatgccgatgcatctggctacggttttgtttatattgtttcacatgctgcctttgtgtcaatttacaggcacagcaggcgggagactccattacgggaaaggtacatgccattccggaagtgggaataaaggggcgacgtgtaccccaacgtatatctgtagcgatgcccatacaagtacttgaaaaaaacgaattggaaaatctcggacttcagaatatagctgatgctgttcgccgttttgccggagccaatgtaaaagattatggtggtataggaggattaaagactgtttccgtccgaagccttggcgctacacacacagcagtagcctacgatggagtggctgtgagcaacacccaagcgggacaaatagatataggacgttttgcattggatgatatagacatgttatctctgtctgttgggcaaaatcatgatttactgcaacctgcacggcttttcgcttcagcaggaatactttctatatacagtaaaaatcctttagaaggaacggacaaagcatataccttcaaaggacaaattaaaagtggttcctttggcttaataaatccctctctcacatggggacaacgtataacacaacgaacctgttataccttgaatagtaattatctacaagcagatggaaattatccttttaaattaataaacggcaaatatactacgaatgaaaaaagaaaaaattctgatataaaatcatggcacacagaagcaaatctgtttcatacattgaaagatagtagccaactgaacataaaagcatattatttcgattcagaacgtggattgccaggttcagtaattctctacaatgatcaagccaatgagcgtttatgggacagaaatatcttcatacaagcccgatacctaaaagacattacctcggaatggaccttgcagggccaagctaaatataactattcgtggaataaatatgaagatacagacgtgaaatatgaaggaggtagacaaacagacattaacaagcagcaagaatattatctatcagctaccatacaatggcagccttgcagtacattttctacttcatgggcaaatgaccttgtacttaatacactagataataatttgcccaacaatcctaatccaacacgatatacatggctatctgcatttaatttacgctatcaatggaaagggcttacagccacaggaacattagtacatacgctgattgccgaggatgtgaaatcaggcaaccgccctgataatcgttctcgtttcagtcctaccctttcatttatatatcgcccttgggagaagtactccctctttctgcgattaatgtacaaagacactttccgcgtaccaactttcaatgacctttattatcaacgtatgggcaatactgacctacgacctgaaaaggcacgcgaatacaatataggtattacctggagtggtactccattctctttcactaattacgtaatgctaactgttgatggatattttaatgaagtaaatgataaaattgtcgccttacccacaacctatgtctggaagatgatgaattttgggaaagtacatatcaccggggcagatataactttacgtacctctatcccgatccaccgtaatattgatttatcaataacaggcaattatacctatcagaaagctattgacgtaacttcatcaagcagtaagaattataaagaccagattccttatactcctctacatagtggcaatgcttccatacttgcagaaagctcctggataaatataggttatgccttaacttgtgtgagcgaccgatacagcctgccacagaacatacaagaaaatcgcattgatggatatacggagcataccctgtcagcatcccgcgcattccaactaagaaaatgcagacttcgcctccaagccgaactaataaacctgacaaataaacaatatgatattatcaaatattacccaatgccgggacgctcatttcggatgacgggtagcctatttttctaattaattacaacctaaaaaaacaaaacatgaaagtaagaagcttattattcagtactctttgtatgctcgcaatctctgtaacattcacctcttgtagcgatgatgacgatgccccatggaacgatgaaggtactaaagtagaattaccacaacgacgaatgttcatcctgaatgaaggaaaagctgataacaacaatgcaggcattgccttttatgcccctaatagagatgctaatgacagcaataataattttattgccaacatctattttaagcaaaatgaaaaacagttgggagacactggccaggatatattagaatatgaggacaatatttatgtcattgtgtccggctcaagcctattgctgaaactgaacgctgcggcagtggaagaagcacgcctttcattcagtagttctgatggtcaaccacgatacatggcagctaaagacggcaaaatctacgttacactttggagcggaaaggttgcacgtattgattctcgcactatgaaaatagaagcttatgtcgatgtcaatgccaacccggaacagattgttgaaaatgaaggcaaactatatgtagcgaattccggatatggggaaggaacagatgtttctgtaatcgacctgaatactttcaaaaaagaaaaagatatacccgttgtaaaaaatcccaatcgcatacttgaatcaaatgatgaagtctaccttttatcatggggtatctggaccaatgtattgggtgaaggctacaccttccagcgcataaaatcggatgatactgtggaatcaatagcagtagcatcagcctttgcagaacatgatgatacgatttttctcatttattctgactggaaaagtgacggatacgagcatattttttccacttataatacaaaaacacataaacttaccgaaggaaatttcttaaagaatgcccctcaggaattattatcatcaagtatatatggttttaatatcgaccctgaaacgggagaattctatatcagtacttctgactatgtttccaatggtgatatttaccgttttaagaaagatggaacttttgctgaaaagtttgattgtggaggtatcaacccaagcaaaatgattttcttacaatgaaacaaatttctgtctttataaccctttgggtgacagtgttatttctttccgcctgcggcggaaagagcagcactgtttccggctctgcacaaggagacagcatcccgctgcactattcttctaatctctctctgatagattacgaaaattacatcgttgcacagttacgcaatccctgggatacaacaaagatactacacacctatgtattagtagacaaaaagcagccgttaccccaagaactgcctctaggtactcttgtccgcaccccacttagtaaagcagtcatctactcatccgttcattgcagcttgctaaaagacctcggtgctttaaatagtattggtggcgtatgcgacttgaagtacatcaaactaccggaaatcgaggaaggatgccgaaacggaaccatcaccgatgtaggtgatggcatgaaccccaatatcgaaagaatcatagacctgcaccccgatgccattctactttctccttttgaaaacagcggcggatacgggcgtgtggaaaagttgaatgtacccatcattgaatgtgccgactatatggaaacctcttcattgggacgtgccgaatggatgcgtttctacggtctactatttggtaaaaaagcggaagcagatgctatgtttgcttcggtagaaagaagctataaggatttacaggaattagtaaaacccatctcctttgctccctccgtgatgtgtgatttgaaaacaagctctacctggtacactccgggtggcaacagcaccattgccaggctatacgctgatgcaggcgccaactatattttcagagaagatacacatagcggctcgctcccctatcctttcgaagttatctttgagaaaggtcagcaaacggatttctggctgatacgctataaccaacctatagataaaacatacaaggaactggaaaaagaatttgccccttatgcaggtttccgtgctttcaaggaacggaacatctacggatgtaataccaaccgggttcctttttacgaagaaacgcctttccatccggactggttattgaaagatttgattaaaatatttcacccttcactgttggaaggctatgagctgaggtattacaaaaaactatcagaatagaactgatgataagaacgaaagcaaaaggatatatatatggcatagcactgtcggtcctcattctcgtattgatggctgcgaatctctggttcggttcaatcaatatccctgccggagctgtgtggaatactctcataggaaatgaagtagaaaaaaccagctgggcttttattatctgggagtcccgtctgccgcaagccgtcacggcattactatgtggtgccgcactcgcagcttcgggactgatgctacaaacggcattcaacaacccactggcaggtccatccatcctgggcattaactcaggagcaagtcttggtgtcgcattggtgatgctggccggtggaggaagcattgctacaggagtatttaccttatccggtttcttttccgtgatactcggtgccttcatcgggtcgatggtggtaatgggacttatccttttcttttcgacactgataaaaagcaacatcatgctgctgattacgggtatcatgatcggttatatcacttcgtccgctatttcattacttaatttctttgctactgccgaaggggtacattcttatatgatatggggcatggggaacttcggaggtgtctcattgcaacaactcccctatttctccattttctgtctggcaggtttgttactttccatcctgcttatcaaacccttgaatgccttgctgttgggtacgcgctatgctgaaaacttaggagtaaacatccgtcgcacaagaaatctgttactgattgccaccggactactgacagccgtcaccaccgccttctgcggaccagttgctttcatcggtctggccgttccacatatctcccgcctgatgctgggtacgtccaatcacaattcactgcttcccatcactttgctgacgggtggtgtaattgccttgctctgcaatctgatctgcatccttccgggtgaagcaggtattattcccctcaatgcggtaacccctgtgctgggagcgcctgttatcatttatgtcattgtcaaccaacgtaaaatacaatacttcaactgatggagaaagctgttatcaccgcaaacgatttatgcatcggctaccgccagggaaagcaagagaaacggatacatgaacatctctccttccggctctatcccggagaactgacctgccttctgggagctaatggaaccggtaaatcaactctgctccgcactttggcagcttcgcaaccggccttgtcaggagaattatttgtacaggaaaagccattgtctgcctattccgaaaaagaacgttcacgtaccatcggagtagtactgacagacaagacacaagcaggcggactgactgtatatgagttggtagctctgggacgacaacctcatacgggattcttcggcagattgaacaaaacggatcactccatcattgaagaggctctggaagctgtaagcatcagtcataaagcacacagttatactgcagagctatcagatggggaacgacagaaggtcatgattgccaaagcattggtacaggaatgtccgctcattctgctggatgaaccgacagctttcctagatgtagtgagtcgcatcgaaattatgactttgcttcatcgcctggcagtggaacaaaagaaagcgatcctgctttccacccatgacatagagcaggcattggtactggcagataaactttggttactttcaaaagaaaacggactgcaatgtggagtaacggaagatatgattctaagtcaccggatggacggcttgttttcccgcaacgatatccggtttgattatgcgcacggagtatattatcccaaagtggatagtaaccgctgtatcattgtggaagccaatgatgaagtattgctgcactggacaacaaatgcactcaaccggcatggctatgcttgttctcccatttctacgtcagggacggtcgatttgccatacttacaggtattgtctgccgaagatttcagactgcataaagaaaaggaatacaaattccactctttcgaacaactacttgccaatgtctgacaaaagcaatgatatttatatacaaacgcactgatttcaactaacgctttatttctgataatcaaaagaatacaaaatattaattctttgtttacaagaagttgggaatttgccgacaagaagttaacttcctgttgacaaactcccaacttcttgtaaactgaaaagatgatgtttttctattatcttacaaagaagtaaaaagaagtttcagccgaaagaccaatgaacgaggaaaatccggtgagggctgaaagatctggaagcccaaaaaggtatttaaacttggttcatctgaaacttccagtgcatgagttaaaactttcccgggaattagctgtatatatcggacggggagtatctatatattggatgtgcaacatctatatgtccaacgtgttgtatctatatatccaatgtattgcatctatatatccaacaccaccgatatatagatgctaaaaacacagagtgaggaagggcatttgctacttccaactcacgcaactgaaattccggatgatttctttatttcatcaccagtatctcatccggcaggtatccacttcggatacgccactcctgcggataaagattattagcccggttaccgatattcttcacaaaacctaaaggaacatccttatacgtcaacagcacataaccgcgtggagcagtatcgggaagcacaatcgcttccttacgcaaataggcaatagcctgttcatacgaaatttcttcacgaggaaaaacatcggaagcctgcacagtgctcatagcaagggcatgattgggaatcaggtccttgcctttcacttcggcaagggtaacgcctgcctgaatgacacgaagagattgttggaggacggataatccggatatatattctttagggaaagccgcaatattcattccatttacagaaatctcatagtcatctgccgaaaggagccaggcacgggcggccaataattgttccttagatgctccggcattagttttagatgctgaggcaccagctttcttctttccttgggaaacagtggatttgtaacggattcgtaccgtctctccttccggtttacgaagtacggcaaggaaaaagccctcaccctttgtacggtgaggcagaaaacgatatacaggaaaatcttcaccagcaagcaagtttccggtaatgttccacgctgccggagcatctaccggaagtatctctgcaccgaattcatcacgcatccagcggatattttcttcatcttcctgcgtattatacgtgcaagtgctatagataagcaatccaccaggtttcagactgggccatatatcggagatgatacgtcgctgacgttgccagcagatttccacattctccggactccattcgctgacggcaacgggatctttacggaacataccttcaccggaacagggaacatcggtcaatatgacatcgaagaagccttccagatcagcaaagtctgccggatcgttattggttaccacgacaccgggatgcccccacttcgtcagattctccgccaggatttgcgaacggttacggatcacttcatttgctaccaacaggctgcctgcaggcaatacactgcgggcatgggtagattttccaccgggagcggcacaaaggtcaagcatcacggaaggcgtttcaccgatatattgctttaatgcttgctccacaaacatggaagatgcctcctgtacataatagcatccggcatgaaacaacggatcgaaggtaaacgtcaaccgacggtcgagataaaatcctgtggaagaccagagcacacgcccggaagaggtatgaaaaagactgaatgaagaatcgggtagtttttcttcattcagtcgtatgcttacgggctgttcgccatttaaggcgtcagccagtttattatattcttcatctcccaggaggagacgggtacggtctgcaaaagatacgggtaaatccatgtgccaaattattttatgtccgcaaaggtaatgcaaatcgaatgcataactttcatgcttgcatgaaaaagttatgctgagatgcagcttatcttcttcaaaggtaacataaaaaggcaatacaaggcaaacccgccgggcactaaaaactaagcttgactcccgcaaagtaggaacgaggcgctcccggaccataaatgtaaccggaatcgcgagtggctcctttatcaaaatctttctgataggagttgaagatattctgtactcccacattgaattgcaggcacataccggaaaaatctatatcataagctaccttggcacccagttcgaagaaatccgggctcttcaccaacaggtctgccgtaccatctacttcagacatcagatgaggcacatacattcgcccggtataattaccgttcagggctactgacaatgcttttgtaggattgaaagtggcagtaaagtaaccataaacatcgggagtacgcaatatccggtcgctatggcgttcttcatccgacaaatgttccttgtctgcactccactcctcgggagaatcgtacagactgcgttgcacggtcagtcccgcctgcaactggattttatcacgccaggcgatctttccttccaatgtaccaccatacacctttgcaccggaaccgttgacacgggtttgtatcagatatccactacctttcggatcttctaccggtgctgtcagtacaaatggatcggagagtttcgtgaagaaaccttctatcagcaaatttgcctggaaatcaccgaagtaatgataccagtccatcgaagcgttcacactgcgcgaacgttcttctttcagatccttagcacgaacgatggaaatcaactcgcctcccacattacttatatgtaagtcttcgtcgaaagcctgcggagcacggaaaccctcagcataactgaaacggatatttatgtcctgcgtagggttgtagcggatattggcacggggactgaaaatggctttgctcataatgctattcttgtccagacgtccgcctatcagaaaactccactgctcgcttttccattcattctgcacataggcactcgcaatgttcacaatctgtttcaagggatcgggtgtatatttatcaatcaactgttgcagacggtctcctgttgcggtgggatcttccgccaaagcggcatcccggtatttttgcatatccgttgctttgtcgtccagattatcatgattaaattctaccccacccgtcaagtcggaaggcataaaaaagagcttatcaaaatgatagatatactgaacgcccaatacaccggtgaaatcggtggtatgcccataggcactgtaataactgtcgcgcacgatatgctgggcagaggcgtatgcattgaacgcatgcttctgatccttggagaaggcactgaacttcaagccgcccgtattgatggaatgttcaatctgctccaccagtccgggttcgccggaaccattcagattggcatcttcggcaatgtgaggcggcagatcaaagcggttaccgccacgacggaattcttccatgtgatgatattccagattcaacttagaataggggctcagcctataataagcgttcacgcctactgtctggttcttcaatttgggtaattcggaaaaactgtcaccgttggaatcccatgccgaacggtggcggttctgcccgtagaggtaagctcccattttgttatccgaagataccagagaaaggttaagcgtagtattattgtcaaacgaaccggagccatcaaaattggagatagagtgggcaaacgaacctgagttgcggagaggttctttcgtaatgatattcactgttccggcaatggccgaagagccgaaaagagccgaaccgcctccacgtaccacttccacacgctctatcatattagcgggaatctgctccaaaccgtaaacacccgccagtgcagaaaaaatgggacgggaatcaatcagtatctgtgtatatttcccgtccataccattgatacgtacctgtgagtaaccacaattctggcaatcgttttctacacgcacgcccggctggaagacgagaccttgcgacaaggtatgcgaattggtcatgtcgaatagtttcggagtaacaacttttaccaaggtaggtgccagtcggcgagcggtttcattacgattggctgtaacaactacaccgtccaaggctaccatatcttcttccagttcgaagttttcttccagcgtcttgcctcgtttaagggttacttttcgttcttgtggtttataacctacggcactgacggagagtatgaactcaccttccggaaggttcttcagaaaataatgtccggtaccatcggtcatagttccgatagtggtccctttcagggctactgtcatataaggaaggtgttctcctgtttttttctctaatacgtggccaataatattggcgtcagatttatttaaatcaattgcataagcggtgtgggagagcaatgtacacatcactcccaccacgaaaaagatatattttttcatgtagttctaatttttaatggattttaataaggggaattcctattgtcaatgaactacaggtggtgcacgcagactgatgccgcaacgaactcgcacgcacttggtatgttctacagctggaacactcagtacacgcaataaaataaggaaagccgatgcgacaaaaagaatagccggtagagaagaagctacaaaagaagaaaggaagaatatcgtttcaacctgcgcttccgtatggctatgttcacctttgaacgggtgggaatgtacaataattaccccatttaccacatgcgagtgagtaaatagtgtaatacctcctaaatatgcgataaataataaaggaaggaaccatttcaatatattccgtaacttctccaaaaagcgttttaatatagatttgcgaaagtagcactaattacaataagaagcaaccggatttagttgttttaaccggatatagagcaaaatacctacatcttatgagtacaagaagtctgatattacattattattaaataaaagtgatccatttttttcggttatgaaagaatcaatcccaccatccccctttacatctaaaatatctgcaaatattttcagataataccgattttctaaaaaaaatatcgtctctttgcaactttctaactggcatgatacgtctaatacacaaagaaacaataaaagataaaacaaaatatgattatgaaacggataattttagcactcatcgccgccatgacattatgttcactggtacaggcaaaaaacagaacggttacagaaaacgacagtctggggaacaaaaagcgcgtgatcgaactgcgcgatactaccatcgacggaaagacagtaaccgatacgctcagcatcatgacctacgaaggcagtagttcagacagcaaaagtgataaaggatggaaacaccacaacggcagtggttgggactgggacttcgatttagatggcaaaacctctgaaaccatcatttcagttactgccatcgtcttcatcttcggtctgccgctactcatcgtctttacggtattcttcttcaattacaaaaatcgaaaagccaaataccgccttgcagaacaagcactttcgagtgggcaacaactgcctgaagacttcttcaagaatgcggagaaaacagaagatatccgtaccaaaggtatcaaaaacatcttcatcggcatcggattattcatcttcctctgggccattaccgagaactttggagtaggttgtgtcgggctgctgatcatgttcaccggattcggacaattagttatttattatacgcaagactctaataaaaagaacaaccgggagagatgagccaactcaatgacatatcgttagtcgcacaggtcgtggtgtttcgcaacaccagggccttcgaccagttggtgaaaaagtaccagtcgcccgtgcgacggttcttcctcaacctgacttgcggcgacaacgagttgagtgacgacctggcgcaggacacgtttatcaaagcctacaccaacctggcttcattcaaaaacctgtccaatttctccacctggctctaccgtattgcatataatgtattttatgattatcttcgcagtcggaaagagacagccgacctcgacacccgggaagtggatacccgctggaacaccagccaagatgacgtaggacaacagatggacgtttaccgggcgctagcgacactaaaagaaatggaacgaacctgtatcaccttgttctacatggaagatcagagcatcgaaaagattgcaggtatcacgggatgcccggcgggaacagtcaaaagccacctctcgcgggcgaaagaaaaaatggctacctacttaaaacaaaatggttatgacggaaacaactgatgataaacttttgcagcagttcttctctgacaatcggaaagagatagaagataacggcttcagccgccgcgtgatgcaccacctacccaaccggtattaccggatttcgcagttgtggagcttattctgttttacgcttgccgtagtgttgttctttgttctcgacggcttgcagcttgtgctgggggccttacgcgaaactttcaccagcgccatacaaagcggtgcagcggaactcgatcccaaatcactgattatagtggcagtagtattggtctacttaggatatcgcaagatttgttctttagcataaagctcatttattcttgcaataaatccgtttgcccttacaataatttagttagcccttgcctgcattttgcaggtcaagggctaattttttttaactgagcaaacatttctcatcaataaattgtatctttgtcgactcaattagaaaaactaactaagcgtaagaagttttgagaagaatattattcatcatattatcatccgcattattctttataggaaatattcacgcgcaagtcgccaccagtgactcgctcgtgatgcattatctacaacaacaaggcattccggttaccgccaacaatgaagtaaagcttctgatgagcggacgggagaagtttctggatctcttcgaagaaatacgccacgccaaacatcacattcatctggaatacttcaatttccgcaatgactccatagccaatgccctattcgacttactggctgaaaaagtacaggaaggtgtggaagtccgtgctctcttcgacgctttcggtaactggtctaataacaaaccattaaagaaacatcacctgaaagcaatccgtgaccggggcattgaaatagtgaaatttgacccgatcaccttcccatggatcaatcatgccatgcatcgagatcataggaaaatcgtagtgattgacggcaaaataggatataccggtggtatgaatatagccgactattacattacgggactgcccaaaatcggtcaatggcacgacatgcacatgcgtatcgaaggagatgccgtgcgctatctgcaaggtattttcctcacgatgtggaaccaggagactaaacagcacgtcggtggccccgtttactttcctgatataccgcaactccccgacagtatagccgaagaaatagccatagtagaccgtacaccgagggaaactccccgctccatcagtcacgcttatgcagcatccattggagctgcgcaacacagcatacagattgtgaacccctactttgtaccgaccaaatccatccggaaggccattaaatatgcattaaaaaaaggtactgaagtggaaatcatgatacctgccgtttctgatattcctttcaccccggaagcatccttctatatcgtacacaagctgatgaagaaaggggcaaaagtttatctctttaacggaggcttccaccattccaagattatgatggtagaccggaatttctgtactgtgggtacagccaatctgaatagccgcagtctgcgatatgactttgaaacgaatgcgtttattttcgatcctacaatcactcaccagttgaatgatatgtttgaacgggataaaaagaatagtacgctattgactcccgaagtttggaaaaagcgttcaggatggaagaagtttgtaggttgggtgggtaacttaatgacaccgttcctttaattatacctccgttcctctaatttttaattgaaaattattctatgctatctgccgaagtttagttacctttggcgaggcaaaaaaaggttgccccttttgttgtttataattcgtaatctgcaatcatgaaacaatatttagacttgctcaatcgggtattaaccgagggcgtacacaaggaagaccgtaccggaaccggtacaatcagcgtattcggacatcaaatgcgcttcaatatggaggatggctttccctgcctcaccaccaaaaaactgcatctgaaatcgattatatatgaattgctatggttcctgaatggagataccaatgccaagtatctgcaagatcatggtgttcgcatttggaacgaatgggcggatgagaacggtgatctgggacatatttacggttatcaatggcgttcctggcctgattacaaaggtggttccatcgatcagatcagtgaggctgtagaaacaattcttcataatccggattcccgccgcatcattgtcagcgcttggaatgtgggagatattaacaatatgaatcttcctccctgtcatgctttctttcaattctatgtggcaaacggacggttgagtctccaactctatcaacgaagtgcggatatttttctcggtgtacctttcaacatcgcatcttatgccctactgttgcagatgatggcacaagtgaccgggctgaaagcaggggatttcattcatacactcggtgatgcgcacatttatctgaatcatctggagcaggtcaaactgcaactttcccgcgaaccacgtccgttgccgcaaatgaagataaacccggatgtgaagagcatcttcgacttccaatatgaagatttcgaattggtaaattacgatccacatccgcatatagcaggtaaagtttctgtttaacaaatcatatatccaatcatgattagtatcatcgccgccatagaccgcaacttaggaatcggtttccaaaataaattattattctggcttcccaatgacttaaaacgtttcaaggcattgaccacaggaaacaccatcatcatgggaagaaaaacattcgagtccctgcctaaaggcgcactgcccaaccgaagaaatgtggtactttcatctaatcctgcgattcaatgtcccggtgcagaagtattccctacccttgaagcagctttgcaaagctgtcagcctgaggaacaagtatatattacgggcggagcaagtgtatataaacaggcaatgccattggcagacatgctttgcctgacggaaatcgatgcagaagcacctcaggtagatgcttacttccctgctgtagagtccgcaatatggcatgaaaaaagcagggaatctcatcttattgacgagaaacatccctgcccttatgcatttgtggattatatccgtaagtaattcctaatcttcatccacctccaccatgattggcatctgccgttttatggcttcatggaaggatattagtgtttctgtgcgcgctaaccccaacggctgtaatttatcgtggataatgctcagcaaatggtggttattgcgtgcgtaaagtttaataaacatatcatatttacccgtcgtaaagtgacattccacaacttcgggaatagcttcaagtgcctttgtcactgcgtcaaaagattccggatctttcagataaatgccaatataggcacaagtctcataaccgattttttccggatcgatgacgtactccgaacctttcaagatacctaaattcgtcaatttttgtatgcgttgatgtatggctgcaccggaaacattgcaagctctcgccacttccaggaaaggaatacgggcattatctgcaatcaatttcagtatttgctcgtctaaagtatccaattgatgatgtcccatttctaattttatgattaataaataacgattgcctcaccgtattctcatacgagaatgtgcaaagttagcgaaatttttcccaataaaaatacgatttattacttttcttgctaaaaaatgaataaacccacagttacgataaacagggtgaaaagaagataagctgcatcccggcataactttttcatgcgagcatgaaagttctgcgctcaatttgcattatctttgcctataactacaaaattagattgttatgaaaaaatatcttgtacttgcattgtgcttactgatggttacaataggccatgcgcaaaactacactgagtattttgccgataaaacactgcgtattgattatatctttacaggaaatgctgcccgccagaatgtatgtctggatgaactgtccgtacttccatcatgggccggaaggcgtcatcatttagctgaattacctttgcaaggtaatggacaaatcatcatgaaggatttggaaagtggaaagacaatctatactacttctttctcttccctctttcaagagtggctggaaacggacgaagccaaggctgtcaccaaaggatttgaaaataccttcttactgccctacccgctccgtcctgtggaaatagagatcaccctgttaagcccgagaaaagaagtgcgtacacacctgacgcacactgtacgccccgatgatatacttattcatcagaaaggaactgcacacatcactccacataaatatctgctaaagaatggtgaaactgacaagtgcatcgacgtggccattcttgccgaaggatatactcctgcagaaatgaacgtattctatcaggatgcggaaatcgcctgtgaaagcctattctcacacgaaccgttcaagagtatgaaagatcgcttcaatattgtagctgttgccagcccatctgatgacacaggggtaagtgttccccgtttgggagaatggaaacatacagcctttagttcccatttcagtacattctattctgaccgttatctgactacccgtcgtgtcaaatccatacacgatgctttggccggaataccatatgaacacattattattcttgccaatactgaagagtatggaggtggtggtatctataatgcttataccctgactacagctcatcacccaatgttccgcccggtagttgtacatgagttcggacacagtttcggagggttggccgatgaatatttctacgacgatgatgtcatgacagatacctacccattggatatagaaccttgggaacaaaacataagtacccgtatcgatttcgcttctaaatgggaagacatgctcattaaaggtactcctattcctacccctgtcaacgaacaggcaaagtatccggtaggagtatatgaaggaggtggatattcagccaaaggcgtattccgtcccgctgataactgccgtatgcgcaccaatgaatatccaacattctgcccggtatgccaacgatcactgcaaagactcattgatttttataccaaataaaaagagaaactaaactttaaagaccaacattatgatcaaacttcaacgtatcagcaccgctgatggatttttgtatgagtacatggaacagttaataaccgctgccttcccgcctgaagaataccgaccgttagaagaactgcgcctgtacactgatagcaaacctcatttctataacaatattattttccaccatgatactcctgtaggattcattacctattgggatttcggcaaattctattacgtagaacactttgctgttgatccggcccagcgtaatgggggacatggaaagaacgttttaaatcatttatgcgagttgcttcaacatcctattgttctggaagtggaaatgccggaagaagaaatggcccaaagacgtattaatttctacaagcgccaaggatttgctctttgggagaaaccatatcttcagcctccatacagacccggggatgattatttacccatgctacttatggcacacggaaatttagagtgtgaaagggattttgaaacagtaaaaaactctatatatcgggaagtatataatgtataagaataaaaaaataaagggtgcctattcgaaataagcgccctttatttatatagtttgatttaacttcttactgacgcggctgcgcagaatagttaagtttcaatgcataagctttacgaagagcttctttgatatctgttacgatacccattttcgtatcttggtctactttcaaagaaacagtcatctgcggttgatcttcttccttcatactggcacgttcaccaataatataatcttggatttcagcaacttcagcatagctgtcgttcaattggatacgactttcattacccagtttcttacggaactcagctgtaggctttcctacatagataaacgtaaccaaagatttcttttccagtttttccaactcagtagcttgcggaaccttaaactcaacctttaatgttacctcacgcattgttgttacaatcataaagaagaacaacaaagtaaagataaggtcaggcagagaagaagtattcaacgcaggcatttcgcgtttaccagtcttattaaattttcccattacttcttttctccgtactttttaggttctgcctcagagatcttctgaggataaatatcacgaattgctttttgttggtcttcgtccaaagcagcatagtcctttccccatttctcctgagccaattcatctctcaactcattgtaagcagctaccagctcattctgaacagctaagtatgctttataggaagaaccacggtcacaacgcaaagaaattacatgcttttccgtaatctgcatagtcccgaagaaaggaatgtctttcgcatgcttttccggtttagactcatcattatacgggttggcaatgaattcttttgccttatctctcaactgatctacattaacatattctccactacacatcaactggtcgttcatgttcaggaagactgtcatgacgttacgctccttaaccttatctgaatcgtctttcttttggtcttgctcgggtggtggtggcaaacgtcttgccaaaccacggtccgtatccatagaagtcgtaatcaagaagaagatcaacaataggaaagcaatatccgctgtagaacttgagtttatatcaggaacttttctttttccttttgccattgtaattactccattagattgagttccctcaatcgattatgataatttctttttaatactactgaaaagcattgcaagaacagttgctcccagtaagaaataaatagtatacaagaacatatcagttaccttcaaccaaaagggaacattatcagttccactataacctggtatattcatctgttctccactacccatagaccaagcaacgatcattacaacaaccagcaaaataacacctaacagtgatttcaaagcttttacaggattatcttttaatgcgctaccaaattgtaggataaacgcagctaccattgcaacaacagtcaaagcaaacaaaccatacattaagtacagcagactttctgtctgtgcaggctgccacatctcgggatcaacgcccgtcagtactgcatcgccctgagcatctccaccaaagtagaataagcccaataccactaaaatagcggcgaataaaacatacagtacataatatgatactctatatgataatttagccatttctcttattttttgtatttcaagttatatttgataaccatgtccaacagagtgatagaagaatcttccatttcgctggtcaaagcctcgatcttagacaggatatagttgtagaatacctgcaggatcaaagcaacgatcaaaccgaagatagttgtaatcaaggcaactttcataccacctgctacaaccgtcggagagatatcacctacttgttgaatcttatcaaatgcctgcaccataccgattacagtacccaagaatcccaaagacggagccattgcgatgaacagtgtaatccaagagcaacctttttccaggtaaccagcttgtacaccaccgtaagatactacagacttctcaactacgtcaagaccttgatcgattctcaataagccttggtaataaatagaagcgatagggcctcttgtattacgtgcgatgtctttagcagcttctacgtcgcctttttccaaagcagcttcaatagcagccaagaacttctttgtgttgatttcagccaagctcaaataaatgatacgttcaatacagaatgcaagaccgataaccaaagcaatagcaaccaaactcatgaaagatgcagtaccttcaataaacttagttttaatttccttgtgaataccaccttcttctgcttctacagtagcatcaccggcaggagccgcctgagctgctggagcagcttgttctgtttgttccgctgcaggagcatcttgagcctgagcaagttgagttgagccaaatgttaagactcccatcacagcaacaattgcaaataactttttcattgtgtgtctaatttttaagattaattaattaatttgtttattatattcatttattgtttttgttttttctttcatcctgcggagagacggggattcgaaccccggataccctttagaggtatacacgctttccaggcgtgcctcttcaaccactcgagcatctctccaatagaggcctctttcaaaaacggctgcaaattacaaaaaaaatgcgaaccacaagcgttttcagctacaaatgtattctttttttcgttcttgcccttcattctccccgttttatctttaataaaatctcaaaattaataaactttaaaatctttccgatgttatttgagcattccaaacacttttaaagcgttttccgaagtaacgtctccaacagcctcaggagacatcccgtaaatttcagaaaccttcatcaaagtatccttcacataggcgctttcattcctcttaccacgattcgggactggagtcagataaggagaatctgtttcaagaacaattttgcctaatggtattcctgccaaaatttccggaaggtgggacttcttaaaagtaaccacaccattaattccaatgaagaaatcggaaaactccaatacacgggtagcttcttctgccgttcctgtaaagctatggaatattcctcttaaaggagtctttttgtaaggttccagcaccttatatatataatcaaaagcatcccgacaatggattactataggaagatcatattccaaagcccagttgacttgtttatccagtactatttgctgctctttcaggtaagttttgtcccaataaagatccatgccgatctcccctatagcaacatattccttagaaaacttcaattcgcgagcaactatttccaattctttttcataattggcattgacagaagtaggatgcaaaccaatcataggaaaacagtatcctttataaacgctacaggctgacaacattgcttcaatagtcgtactgtcaatattgggcataaatatatgagttactccggcagcacgtgcacgctcaataacctgtgggaaatcctctgaaaactcctccaaaaaaagatgggaatgtgtatctatcaatctcattcgtttactttttctattcgtttctcaccagtacgataataataaatcagcccgtaatcacgacataattccaaccgtttttcattgggagaaacatcttcaaactttttttccacttgattccatatatccaagatcaattcatctgcagtagttcgcatagcagaaagagaatctaaactacgggcagttaaagcctgcaaatttttctgtcggtcataactatctgtaaaaatatcataatgaactctaaccttcgcaatagtaggattataaataggaatccccccttgagaagttcgtttggtttctccatctataatttttcgcccccactccaccaaggctgcctccgtcgataaatccggtacatttgaactatcagtcggcaaaccataataagatttatgggctgcacgcacttccgaacgaataacagccaggttcaatacctgaatgaaatgagaaatatacagacgagccatctttacattggcctgatgcttacgccctgcttgcgactgacgttcaaagcattggacataatacgattgggcggcttcaaatctcatcaagaaattccgggcttcagtcaacgtctttaaagaaactgccaaatcatagaggttatgggtatcagcctttgcaaccactgctttcagtgcccgtattctcgcctggtctgtatttggtaatcttctataaggcatagttacaaaaaagcacagttaaacttctctgtgtatcaaattttctattatctttttcagttcttcttttttttcttctgcaatactgacagctgcaaggctttccattgcccggttgctatattccaatatcttattttcgcaaactgcttttacaccaatccggtcatacagttccgtcacagctgcaattttctctgccggctggaaagtctctgcgtttatccagctattcaactggttatgctgatccgcattcgcatgctccaatgctttaatcagcatatatgtttttttattacagagaatatccccacctatattttttccaaacactttagcattgccatatacatccagcaaatcatctttcaactggaaggcaacacctatatgcataccaaaatcatataaacgatcagcgtcttctaccgaagcgccccccaaacgagctccaatcttcagactcgccgccaacaacacggcagttttcagacgaatcatctccagatattcttctgcagttacatcattcctctgctcaaactccatatccatttgctgaccttcacaaatttcaagtgccgtcaaactgaaaagatccataacctctttcagaaaagtcgaaggacattctgccataaactgataggcaagcaccaacatcgcatctcccgaaaggatagcagtattatcattccaaactttgtggacagtttcttttcctctacggcgatccgcacgatccatcaaatcatcatgcaaaagagtataattatgataaacttcgatacctgtggccggagcatagatacgggtcacgtcttccttgtacaaattataagccagcaacattaacaccgggcgaattctttttccacccatagataatacatattctaccggagcatacaatcctttcggagtacgcgtaaattgtaagccagcaatatgagaattaaaattttcgagaagctcggaagctgtaaacataatgatagtaaatttaggagaatagtaggaataaaaagaggctgcccaaaagcagcctcctttttatatagataacgtattactgcaatctaaacattacaggcaccgtatatttaacgcgtaccggtttaccgcgctgcataccaggtttccatttcggcatggtaccaatcacacgaagtgcttctttatccagatacgggtcaacacctcttatgactttggcgtctacaatactaccgtccttgttaacaacgaactgtactgttacacgaccttgcgtaccattttcctgggcgatagtcggatatttgatgttcttgctcaagaattgcatcaaaccagccataccaccattcgggaattcaggcatttgttctacaacctcaaaaatggtttgttcttccggttcttcttctacaacagttacaggcacatattttacttctactgccttacctgtttcttctgaagaggcgataactgtttcttccacatcagcatcatccgctacgatttccaacgtttcgttaatcggagctacttcaggaggaggaggagctactttttcttcctgttcagtgataggaaccatttcttcttcaaaatagagatcagtaagcgcctggcttgtatcaatcttgatatcgcgcttcgtccattcaaatgctataaacataaaggcaagcacaataacataaccaataagcatccaagtcgatttcttgttctccaaatctgctttaggtgttttcttaatttccataattataatattattttaacgtgtttctcattttgggcaaatatagtactttttccgcaaaacgttcagccgtactatcttttttaagacaatatgcacccatttttgttttttttatccttcagaaagcacacctgtgcttttgtgccacaaatgtaacgagatattttaaaaataccgtatctttggcaataattttaaatgaaatgttgaaaaagtcatttataacggcgctactactcctgattttctccgttttacatgcacaagacggaaccagcgcctttcaatttctaaaactccctttttctgcccatgcatcagcattgggtggagaaaacatttctattatagaagatgatttgactatggctgtccagaatccggctcttctttcctgcgtagcggataagactctcaacttgaattacatgctttacatggatggtgtcaacgttggtggagccgcatttgcacgtactgccgggaagcgttccacctgggcaataaccgcacaatatgtagactatggggagcttaaagaaacgactgaagaaaatattgaaaccggaactttctccgccaaagatatctctatatcgggtatttatacctatgatttaagtgattattggagtggaggtgtacgcaccaatttcatttactcccactatgataaatattcttcatttgctatcggtgtcgatctgggattaaactactataatcaggagtccgatttttccgcctcgctcgttgcacgcaacctgggaggacagcttaaagcttttgaggaacggcatgagaaattaccagttgatgtacaactgggattcagcaaacgattgtcacatgctccgttccggctttcccttaccctacatgacctcacacactggagtgcctcaaccacagcggcaaacaatttcggaaagaaattgttaaatcatattgcccttggtattgactttctaccaaccaacaacttttatctggcagccggatataatttccgccgcggagaagaaatgaaaataaacggttccagtcattgggcaggtttcacctgtggtacaggtattcaattaaaacggttgaaactgggaatggcatacgccaaatatcatgtgagttcatcctcacttatttttaatttatcatataccttataatatataatagcataactcaaatatgaaaaagataactattgcaatcgacggcttttcctcttgcggaaaaagtactatggcaaaagaccttgcccgtgaaataggctacatttacatcgatagtggtgccatgtaccgtgcagtcactttatacagtatagaaaacggcatctttcagggaaatgacatcgatacggaaagacttcgaaaagaaatagataatatccatatttcctttcaattaaaccctgagaccgggcgtccggatacttatctgaacggagtaaatgtagaaaataaaatccgcagcatggaagtttcttcccatgttagtcccattgcaactttagggtttgtacgcgaagcaatggtagcacagcaacaagcaatgggcaattccaaaggtattgtcatggatggacgtgatatcggaactacggtttttccagatgctgaactaaaaatattcgtaactgccacgcccgaaatccgtgcacaacgtcgctatgatgaattaaaggccaaaggacaagaagccagttttgatgaaatacttgagaatgtaaagcaacgggattatatcgatcagaatagagaagtaagcccgcttcgcaaagcagatgacgcattgctgttggacaatactgacatgactattcctcaacaaaaggaatggttgcaagagcaattcaataagatcgttaaaagataaaggaaaaagggtgtagcccttccgaaagtctgtttacaatctctatatcaacatattatattatggtaaaagtagaaatagatgaaggttccggcttctgcttcggtgtagtcactgcaataaataaagctgaagaagagctagccaatggaggcactttatattgcctgggagacatcgtgcacaatagccgtgaagtggagcgcctgaaagagatgggcctcatcactatcaatcatgatgactttaatcatttgcacgatgccaaagttttgctgcgtgcccatggagaaccacccgaaacctatgaaattgcccgtcgcaataatattgaaatcattgatgccacttgcccggtagtactccgcctacaaaagaaaatcaagcaagaatatactcaaaaagataccgaggacaaacaaatcgttatctatggaaaaaccggtcatgccgaagtccttggtttagtaggacaaactaccggagaagcaattgtcatagaaaagttggaagaagctaaaaaactggatttcaccagaagcatccgtttatattcgcagacaacaaaatcattggacgaattccagaaaatcgtagaatatatcaaagaacatatctcgcctgatgtcacattcgaatattatgataccatctgccgacaagtagccaatcgcattccaaacatacggaaatttgccgcttcgcacgacctggtattctttgtgagtggcaagaaaagttccaacggaaaaatgttgttcagcgaatgcaaaaaagtcaacccaaattcccacttgatagacagcgctgaagagatagacagttctctgcttaccggagcttcctctatcggagtatgtggagcaacctccactcccaaatggctgatggaagaaatttctaaggccattcaatcacgacttacaggacaataagtcatcgttttgaaacaacaaattaacgttaaatatgaatcacaccctcagctttttgctatctttgccgagcgaaaataggctgcgtttcggcaaaatcaaaaaaaacattttgcttttgctcttaacttgcactatttttgcggcaattatttaaaccaaactaaaagattgttatgggaacagttaagtgcataggtattttgacatccggtggcgatgcaccgggaatgaacgctgctattcgtgcggtaacacgtgctgctatttacaacggattacaagtaaaaggtatatatagaggttacagaggtctggtaaccggtgaaatcaaagaattcaaaagccagaacgtaagtaatattatacaattaggtggtactatcctgaaaacagctcgttgtcaggagttcactactcccgaaggacgccagattgcatatgataatatgaaaaaggaaggtattgacgccttggttatcattggtggtgacggttcattgacgggtgcacgtattttcgcacaagagtttgatgtaccttgtatcggattacccggtactatcgacaatgacctgtacggaacagatacgactatcggttatgatacagctttgaataccattctggacgctgtggataaaattcgcgatacggcaacttctcacgaacgcttgttctttgtggaagtaatgggacgtgatgccggcttcctagctttgaacggtgctattgcctcaggtgcagaggccgctatcattccagagttcagtacggaagtcgatcaactggaagaattcatcaaaaacggtttccgcaaatccaagaacagtagtattgtaattgttgcggaaagcgaactgacaggtggagccatgcactttgcagagcgtgtaaagaatgaatatcctcaatacgatgtacgtgttactatccttggacacttgcagcgcggtggaagtcctactgctcacgatcgtatccttgccagccgactcggtgcggcagctattgatgccatcatggatggacaacgcaatgtaatggtcggtatcgaacatgacgaagtagtatacgttcctttcacaaaagctatcaagaatgataagccaatcaagaaagacttggtaaatgtattgagagaactctctatttaattagaatatagtgaaatatgcaaaagcgcggatgagattcatccgcgcttttgcattataaccattttgctacaatttcttctgtcttatcccatagttccttcatctgtacatgatgaaagaatttctctgagagctgtttaggatggcaacttacattcaatgttccggtacgttttcccgcatcttcatccagtaacaaactgatggctgtcgctgctccctgacgaggcgtacgtatgaaaggccggaaaaagatatccgtcaacggatcaaaccacatatgcatcgtaatgatttttgtggaaacaatacccggatcagctgcattgacaataattcctttttctttcaccttcttcgatagagctattgtaaacagagtcaatgccaacttcgtattactataaatcggaatacgccagaaagcgcctttctttccacgcaaaaagaagtctggaaaatccagtttaccaatggcataagtacaggacaccatatttacaatccggcttccctctcccatcaatggcagcaatttacgagtcaacaaataaggagctacgtaattgacacttactgtacgttccaatccatcttcggtgatacaacgtctcgtttccatggtgccggcattgttcattaacaaggtgataacttctccacgctgaagaagttcattggcaaaagaagccgtagaagataaagaagcaagattgaccggtactatttccaatgctatatttcctgtttcccgcattattaactgacgtttctcttctgcgatttcaggatcacgacacgccataatgactttatatccggcggcagcaacagcgcgtgtaatctccattcccataccgccatccgctccggttataactgcaagtttctgtttcattatccttttgcttctatttttgtaatttcccgcttcaagccggccggaagttcttcattcaaatgctgatggcatgccatttcaatggaatacattcgtgcaatacagtaattactatgtttacaattacagattgctttctcctcttcacgcatacggttgacaaagcccggttcattaagcaaagcacgtgccatctgtactgcttcaaaaccatcattcagtacctcatctattttttcacgcgaaactaaaccacccacatataccaacggcatctttatttctgcccgaaatttcagcgcatcttccagaaagtaagcctctttgaaaggaacggtaggtatcatccacttccctaccattcgtactccatacttcagccaccagcaattcatataatgagtcatagaatgaataggcatctgaccacgcatcacatacataggagccttacttacaaaacctccacttagtaccaatgcatgagctcctgattgctccaggcgttttgccacctgcatagtctcatccatttccattccaccacgaaaaccatcgcgcatattcacttttaccaatacagccatgtcggttccggcagctttcatcacctcctgcattaccatgtccataaaatgcattcgattctccaaggatccaccgaaacagtccttacgccgattggtataaggagaaagaaactgagaaatcaaatatccgtgtccggcgtgtatttcaacggcatcaaaaccagcttcacgagccagatttacagcatgaccatacgcgcgtgccatctcaggcagttcctctttcttcaagccacgaacaaaagtaggtgagtaaagattgaaaccgctggaagctccgacaggagtaacaccacaaatgcttttgtgcgacatattgccacaatgtcccaactgtatagccgcagcagcaccttcggcatgtacagcatcggtcagtttttttaatccggggataatttcaggccgcatccataattggcggtcgaacgacaaaccactttgggtgacagctgcataggccacagtagtcattccaacaccaccagccgcaactgaacgatgatagtcaagcaacatttgcgaaggggcattacccggacacatactttcaaatgccgctgagcggatggtacgattccgtaaagtcaacgggccaaaagttacaggagtaaataacttgctcatgagtattattaatgatttgtgatttataagtgagagaaattaatatagaaacggaaaaacacgtttccggtttcctaccgcatctccaaattcttctttatagcgatgccagatagcattggcacgaggaactaggttagccactgtccaccataggaagaccagcccggaaagcgaccatgtcaatatagcccatcctgcccattctataatttcaccaaagtaattggcagaagtgacataacgatacatcccctgcaacggcagataatgctgcgtatctcccggtttacgaagatggcgaattacataatccgaataccagttgattcccattccggtgaagaacagcaatactccaaaaataaactgtggagtcttcagccagtccagcgtataaagagtttcaggagccagataaaaaagccattctccttgcataaagccattcagaaggttgaacaacattcccatcatcataatagcaagcggcatacggctctttcccttcaagaggaaaggaaatacaaaggcgcgctggaaataatgcaattggaataagagaaagaaaattaaaggaacaattgaattatatcgtgctgaattccaccaaagtaataacatcacaataaacacaggtgcctccatcagcatccacgccaacttattattgatagaaatgccccaagatgcagttcggaacattccatatcccgctttgacaaaataaagtgcgataaaaacaaacagtgcgatgatgctcattacaccaagaaatagctgaaaagtcccttgttccatacttgtttcgatttaagtacgggcaaagatatataaaaaggaggaaaaagaaaacttcctccccttaattagtttacaaagacgttagcgaattataaaaaaaacaatgaactttaaatcaaagtgataagttcgcaatttacgtcagaaataagtacaaagttacttacaaaagggaacaggatgagacatagtcgtatatttagggtatctcagtcccatacttagggtatctcagtatgatacttagggtacctcagtatgatacttagggtacctcagtatgatacttagggtacctcagtcgcatactgagatagggttattatacgcctctaatagtcaactagttacaaaaccgcttttagaatcaataaatcaagacaaacagttttaaaaaaacggtctcgttactgatgggttatgaattaattcaccacagattacacagattgacacaaattctattttactgattattagattaataaatctgtgtgaatctgtgtaatctgtggtgagtcttattcattcctataccgttttactcctatttatcgcttcttgataggtacataagtcgtatcttcgagtacatttttgtatgccggacgaatgatacgcttaccttcaaagttcaattcttcattacggtgtgcacaccaaccgacaatacgagccatagcaaacaacggtgtaaaaatttcctgcggtaatccaatcatttcataaacaaagccggaatagaaatcaacgttactcgataccgttttcccattgttctttacgcgaccgaaagtttcgatagcacgttcttccaagagctcaaggaaagcaaactcacgctctttccctttttcccgggcaagatcacgagccagttctttcagtaagatagcacgtggatcagaaatcgtataaacagcatgtccgataccataaattaatccggtcttattataaacttccttattcagcatacgggtaaagtaagtgtcgatctcatccacacttgtccagtcctgaatattctcctgtaaatgatggaacatatcagccacctgaatatttgcaccaccatgaagcgggcctttcaacgaaccaatacctgcggcaatggatgagtatgtatccgttccggtagaagaagtaacacggactgtgaaagtggagttattacctcctccatgttctgcctgaagcaccaacaaaaggtcgagcgtacgagcatccagctgtgtataattacgtttcagcatataaaggaaattttcggcaatagaaagattttcctgcggatggcgaatatgtagcgaacggccgaaagtagcatggcgcaacatattatatgcataagcaataatggtcgggaacttagaaatcaattctatgctctggcgcatcaggttgtcgcgggaagtatcatcggcagcagggtcaaaacgatacatctcaagtacactgcgtgccaggatattcataatattattcccttccagttctataatattcatcttagtcttctgctccaacggcatattatcattaatcagttcacggaaagaagccagctcttccttatcgggcaaattaccggacagtaacagataagccacttcttcaaatccgaaacgtttctctttaacaaaagcatgtacaatatcttctacatcataaccacgatagaacagcttacccgggataggtttcaagccgccgcccggaacacgttcataacccactacattaccaattctggtgagtccaaccaaaacacccgtgccgtcttcattgcgcaaaccgcgctttacatcaaatttggagaataattcggtatcaatccgaaccgcttccttcatatcctcggaaagcttataaactaaatattccttcttcattttcgtatcgttttaatcgttagtattatttttcaattctttccactatctcccgggtaaaagcagaagtggacaaagagacaccgccgggcatgaagcgcgccaggtcggcggtagcacgggcatcaaggaaactttgttccaaggcatgttctatcagggaagcagattctttccaaccaaagtattcgagcatcattacagcagacagaatgatggaacagggattcacaatatctttgcctgcaatattcggtgctgtaccatgggtggcttcaaagatggcatgtccggtctggtagttaatatttgctccgggagcaataccgataccgcccaccatggcagccaactgatcggaaacataatctccattcaagttaagggtagcaatcacagagtattcttcaggaatcaacaatgtattttgcaggaaagcatccgcaatacaatcttttatcaccaaccttccatcagccagagcttctccaaactcacgttcagccaactcatagccccactttttgaaacctccttcggtaaacttcattatatttcccttgtgtaccaatgtcacggaaggcagattattctcaagtgcataccggcaggcagcacgcaccaatcgttccgttccttcttttgaaacaggtttcacaccgaaagaagatgtcttggggaaccgtactttcttcacccccatttcatcgtgcagaaacttatagaacttttcagcctccggtgtaccggcttcccactcgatacctgcataaatatcttccgtattttcacggaatacacacatgttcaccttctccggatgacgaaccggagagtgaatgccctgataccaacgaaccggtcgcaggcatacatacaagtccaatgtctggcgcaatgccacgttcagtgaacggataccaccaccgacaggggtcgtcagcggacctttgatacctaccttgtaatcacggaaagcttccatcgtttcatcaggcaaccacaggccacatttttcaaaagcccgttcgcctgcccacacttccatccattcaatttgccgttgtccactatatgctttttgcacggcagcattcacaatagcttgcatagaaggagttatttcaactcctaccccatcacctgtaataaaaggtactgtaattttatccatctttctatcttgcattaagagcagaaccggcacggaaccagcctatctgctgttcattatacgtatgttgagcttcgaagctatccttcgtaccatcttcgtggtgaaggacaatcttaagattacggccgggagcaaagtccatcaatccgattaccgaaattaaatcatgttcctgaatcttatcataatcggctttatccacaaaagtcaatgccagcataccttgtttctttagattcgtttcatgtatacgggcaaaactctttgccaggatcacacgaacattcaggaaacggggctccatagcggcatgttcacgactggaaccttcaccatagttttcttcggctactacaatggaagaaattccttcagacttatacatctttgccgtaccggaaaccggaccgtacgtattagtcaaacgattccagacactgttagtttctccattgaaagcatttacagcacccatcagcatattgtctgaaatattctccagatgtccacggaaacgaagccacggacccgccattgaaatatggtctgtagtacatttaccctgtgccttaatcagcaacggcatattaagtaagtcggtcccttcccaggcagggaatggttgtagtaattgaagccgttgcgaatggggattcacattgatttccaccttttcactgctgggggctatatacccttcgctaccttcggcaaatcctttcggtggcaattcttcacccacaggctcagagagttttaccttttcaccttcacgattcaccaatacatctgtcagcggattgaaacaaaggtctccggcaatcgtcagtgccatcgtcaattcgggggaagcgacaaaggcgtacgtattcggattaccgtctgcacgtttagcaaaattacgattgaaagaggttacgatagaattcttgcgagtagggttatctgtctcacgtttccactgaccaatacagggaccgcaggcgtttgccataattgtagcaccgattttttcaaaagttcctatcataccatcccgctctgctgtagcccgtatccgttcggaaccggggttcacaatcaggggagcggctactttcaggtgcttctcttcaacctggcgggccagggaaacggcacgacttaaatcctgataagacgagttggtgcacgaacctatcaatccgacttccatcttgcgcggataaccgttaaccaatactttttctgcaaattcagaaataggcgtagcggcatcgggagtaaaaggaccattaatataaggttccagccttgaaagatcaatctcaattacccggtcgtaatacttctccggggtaatcatgatgtcggcatctgcacgaagatcacccgccacagaatcagccatttctgccacttcttctcttcctgtagctttcagataagtagccatacgatcatcataagggaaaagtgacgtagtggcaccgacttcggcacccatattacaaatagtcgccttaccggtagcggacaaagaagccgtgcccggtccaaaatattcaatgattgcatttgtgccacctttaaccgtcaggatgcctgccaacttcagaatcacatcttttggagctgcccaaccgcttagttcacctttcagatgtacaccaatcaagcggggcattttcaattcccattccataccagtcatcacatctactgcatcggcaccaccaacgccgatggcaaccatacccagaccacctgcattgggcgtatgcgaatccgtacctaccatcattccaccagggaaggcataattttccaataccacctgatgaatgatacccgcacccggttgccagaagccgataccgtatcgggaagaaacgtcacgcaaaaaatcgtatacttcttcgtttgtcttggtagcagtggcaatatcttcccgggctcctctataggcctgtatcagatggtcgcaatgtactgtcgaaggtacggcaacttgttcgcgacctgcattcataaattgcagcaatgccatttgggcggttgcatcctgcattgctacacggtcagggcggaagtttacataatcttctccccgcttgtagtcttttacccccttctcatcaaacagatgagtgtacaaaatcttttctgctaatgtcagcggacgttgcagtatagcccgcacgtgttccattttccccttataagaagcataaaaggcctttaacatagttacgtcatacaccataatcacatttatttttagttttccaatattgtaaagattacaaattaatataataaacaaattaaaatcgttaaaggtttaacaaattaaagcttttcttcgtgcaaaagcgaagaatgattacctttgcgaaaaaactatgcgatagatgataatttagcggcttcgccgctaaattatcatttatcatcatccatcattagtttatatgagcaataacctcctttctccaacagaccatcttcagcgacaagaactgctcctgcgcatggaatatgaattcgaaaaggaagaattcaaaagacagactgaaaccatgggcatcgcccgcaaggtgaaacggggactctgttggtatcctgctactcccggacgaagttactacaattcactgaatcaattagtaatagaaattacacatacggaagatactgatatagaacataattttgaattcgggcgtcccgtctgttttttccgtaaaggctacgacgaaaagatcacatatttcaattctattggtactatcagctatgccaacgaaacacgtatggttgttgcaatgcccggtgcaggtgctatactggaagtacaatctgccgaaaacctcggagtgcagctttattttgatgaaacatcctaccgcactatgttcgaagcactctccgatgtaattcgcgctaagggcaatcgattggcagaattaagagatatcatgttgggaactttaaaacccggattccgtgaactctaccccgtccgtttcccctggctgaactctacacaggaaaatgcagtgaacaaagtattgaactcccgcgatgtttctattgtacacgggcctccgggaacagggaaaacaactactctcgtagaagctatctatgaaacattgcaccgcgaacctcaagtgctggtttgcgcccaaagtaatactgccgtcgactggatctgtgaaaagctcgtagatcgtggtgtaaatgtcctgcgcattggcaatcccacccgggtaaacgacaaaatgctttcattcacttatgagcgccgcttcgaagggcatccggcctattctgaactatggagtatccgtaaagccatgcgtgaaatgggtggcaaacatcggggcagttatgaggaacgtgaaagcgcccgcaatcgtatgagtcgcctgcgtgatcgtgccacacaattggaaatacaaatcaatgccgatctttttgacaatgcccatgtcatagcttccacccttgtcagcagcaatcaccgtatactgaacgggcgtcacttcggtacactttttattgatgaagctgcccaagccctggaagccgcctgttggatagctattcgcaaagccgaccgtgtagtactggcaggcgatcattgccagcttccacctactataaaatgttacgaagctgcccgtggaggcctcgaatgtacattgatggaaagagtggttgccaataaacccagcaccgtctccctattgaaagtacaatatcgtatgcacgaggatatcatgaaatttccctctcagtggttttataatggagaactacaagcggctcctgagatacgatatcgcggtattctcgactgggacactcctatcaactggatagatacttctgacatggattttaaagaagagtttataggagaaacattcgggcgtatcaataaagcagaagcagatttacttcttcaagaattaaaagcttatattaaccggataggtggaaaacgcgtattagaagagcggatcgatttcggtataatttccccttacaaagcccaggtgcaatatcttcgcaataagattaaagcaagcggctcacttaagccctaccggagtctactcaccgttaacaccgtagacggcttccaaggacaggaacgtgatgtcattttcatcagcttggtccgtgccaatgaagacggacagataggtttcttgaatgacttgcgaagaatgaacgtagccatcacccgtgcccgcatgaagctggtgatattgggcgaagcggaaacaatgaaacgccacaagttctatagggaactcattgagtacatccataccatcacatagactcgccaaaagaaaaactcatcgacttatactgaaatatctttttcccagttagagaaatatattttctcaactgggtaaaaataggcttgctttaaattcaactatagaaatcggagaacttaatgtaaacaccggatatttcggctaatccttttttgtcaataatagatttatgaagtccccggtaacttcatgctttgttataaaaaaaagaggagcaacttacgttactcctcccattgtcttcttcccgaacttaaatcaggattacggttacaaatatactacattgaaacaccgaaatcaagtattcgggcatttttattcttaatccccaagaaggattagttgttttccggacgcaactgacgaaccgtaacagcggtctgccacatttcgctttcgcgcaactgacgaagttcttcgttcagtttctcacgataatcgggttgagaattgctgtcaatagagatctgagcctcattaccagacttaacgcttgcatacaattgttgtactaccggcttgatagcatcgtggaacggagtcatccagtccagagcaccgcgttgtgcagtagttgaacagttagcatacatccagtccataccattctttgcgaacaacggcatcaatgactgagtcaattcttctacagtttcattgaatgcttctgacggagtatgaccgttttcacgcaatacttcatactgagccaacagcaatccctgaatagctcccatcaatgaaccacgctcacctgtcaggtcagaagtagcttcacgttggaaagtagtttcaaacaaatatcctgaacctataccgatacccaatgcaatggtacgatccatagctttacctgtagcatcctgatagatagcgtaagaagagttcaaaccacgaccttcgaggaacatagtacgcaatgaagtacccgaacctttaggagctaccatgattacgtcgatatctttctgaggaactacacctgtacggtcgctccaagtgatagcgaaaccatgagagaagtaaagagcttttcccggagtcaggtaaggtttgatagtaggccatacagacattacggctgcatcagacaacaagcacataatgatagtacctttctcacaagcctcctcaatgccaaacagtgtttcacccggtacccatccgtcagctattgctttctcataagtcttacccggacgctgtccaacgattacgttgaaaccgttatcgcgcaggttgcatgcctgtcccggtccttgtacaccataaccgatcactgcaattgtttcatctttcaaaacttcacgtgctttttccaaaggaaactcttcgcgggtcattacattctcagtaacaccgccaaaattcaattgtgccattttcttttttagttttttatttgtggcttgcgccagctaatgattaataaaattatttctctgtaaatattacttttgaacggcaaaccacctcgctgccattctttttcacttcaatatcgaaagctccgtcacccaattcatctttatagagtgtaagttcatcaccgtaataactctcagctacgtaagccatttcaaaacggcggatacgcttttccttatacatctctatcggaaacaagtccatgatatgttcgatgtagcggatactgttcacgtgtccgttgatgtcgatatcactgtatttagctttcaatgtagctaccggttcggtagaagtcactttgatgcgtgaaggtttctcgatagggcaaagttcatcgcacacataatctacaatgctacctccgtgcaatgccagcaaatcggcaggcttgcgggtattgaggttaatcatagcccatacagaacgcgcataaccaatcttctttccgtctttgtccaacaaggcaaagttacgatctgtgaaaaggcggtatacattctctacccaagtccagatggtaaagtcctcatattgataaggcatttcatccagttcgatggcaaggcgggagagtacccatgtgtagttgtcctcattcagcgtggctataccgaacccacggtcgctggcatggaaaccggcgcaattcagcaaatggtttcccaacacgcccatggtaagacgcccggtaaagtccacatgaaaaggctccgctacaaactgatattttcctatcttactactattctcactcattgttttgctccttttcttttttcaagcgatatttcgtttcacggtcggcaaggtattcgttcacacgctcgaagcaactcgtggtgatagccacacgccctgaacgaacaaactgaagtacacaatcaagggcacgcagctcgtcataaagattggtgatttcttcacccataccattcttctctacgatagcaaacacagcattcacctctacgatacgtgcattatacttgcggattactttcgatacctccggtttttcttccagtatcggggttgttatcttatacaatgcaatttcgtgctgatagatctcatcatccgtgaagtagtgcgcttgaagcacatctatcttcttggtgatttgcttggtcactttctcaatggtgtctttatccgtccatgcggtaatagtgtacttatgtacacccttgatggacgaagccgaaacattcaggctctcgatattgatctggcgacgggtaaacactgcggttacctggttcagcaaaccggcgaagttctccgaatgaacgattatcgtatataatgtcttatccatactaaattaagaattaagaacgaagaataaaattagcattctaacaacatctggtttaccgaaccacccggaggtgtcatcggcaatacattgccttcttccataacgcaggcttccaacaggaacggaccatccgtagcaagcatttcctctattgcacctttcagctcttcacgtgtcattacacggcgcgaaggaatgtcgtaggcagaagctatcttcatataatccggattcagcatcggagtaaacgaatagcgacgattgaagaacatcgcttgccactggcgtacattacccaggaagttattattcagcaagatcatcttaacgggagccttctgttccataatggttcccatctcctgaatgttcatttgcagaccaccatcacccataaatacacatacagtgcggtcgggacgtccgaaagttgcaccgattgctgcgggaagtccgaagcccattgtacccaacccaccggaagttacaatgctacgttccttactatacttaaagtaacgggcagacatcatctgattctgaccaacatcagtaaccaatacagcttcatgattcgttgcctcacttacggcacggatcacttctcccatactcaaagatttacttgccggatgcaactcaggacggatcaccttttcttcctctactttctcgtaaggcaagaaactatccaaccattcctggtgagtagcaggtttcagaagtgccgtaacggcagcaagggtttccttgcaatcgcccaatacggcaatatctgtcttcacattcttgtctatctcagcaggatctatatcgaaatgaatgattttcgcctgtttggcatacgtatccaactttccggttacacggtcgtcaaagcgcatacctacggcgataagtacatcgcacttattcgtattgatattcggtcccaagttaccgtgcatccccagcatacctttatttaaaggatgtgcagtaggcaaagcagaaagtcccaacagtgtacaaccggcaggtattccggctttttctatgaaagcgcgtagttcctgttgtgcatcacctaactcaacaccctgtcccaccaataccaatggacgttcagcgctattgatcagttcagcagcctggctcacagcctcttcattcatttcgggaacaggctggtaactacggatgtaatccaacttggcaggagcatattcacttttctctacttgtgcattcttggcaaagtccaatacaacaggaccgggacgaccgctttttgcaacatagaaagcgcgggctacagcccaaggcacatcctcggcactacgaatctgatagctccacttcgtgataggctgcgtaatacctaccaggtcaacttcctggaaagcatccgtcccaaggaatcccgtacctacctgaccggcaattactaccaaaggggtactgtctatcatagcatctgcgatacctgttatcgtattcgtcgctccgggaccactagtcactaggcagacacctacttcgcctgatacgcgggcaaagccctgcgcggcatgagtagcgccctgttcgtgtcgaaccaagatgtgattcaatgtcttccgatggtcgtataaagcgtcaaataccggcatgatggagccacccggatatccgaaaatggtctttactccctgatgttccaaggaacgcatcaatgcttcagcgcctgttattatatctttcattctattaatggataatggaattctatttcatttgtcaattctcggttaatcaatcagtctcactgcacccttatcggcagaacttaccatactggcatacgccttcaaactctttgagacttcgcgttgacgggtgacgggagtcatcgggcgagcagccagttcctcatccgttagtttgacgttgatagcacgtccgggaatatcaatctcgatgatgtcaccatcctgaatcttaccgatattacctccggcagccgcttcgggagaaatatgtccgatactcaatcctgacgtaccgccactgaaacgaccgtccgtaatcagtgcacattccttgcccagatggcgcgatttgatataagaagtcggatagagcatttcttgcataccgggaccgcctttcggaccttcgtgtgtaatgaccacaacatcaccgctgaccactttcccggcaaggatgccatcgcaagcagcgtcttgtgaatcgaacactttagcaggacctgtaaatttccagatgctttcatccacacctgccgttttcactacacagccatcctgagcgatattacctttcagtactgccagaccaccgtctttgctataagcatgttccagatcgcgaatgcaacctccggcacggtcagtatccaattctttataataggcatcttgcgaacccagtaccagattgaactttccggcagcagcactcttatatttcttcacagcttcttcgcaaacattcgggctggtaataccgtatttgtcgattacatccgccagcgtcataccgtctacacgctttacgttcgtatcgactaatccgcctttggcaagctcgctcatgatagcgatgatgcctccggcacgatttacgtcttgaatgtgatacttctgagtattcggggcaaccttacacagacagggagtcttacgtgacagcatatcgatgtcatccatactgaaatctgcctctgcctcgtgtgctacagccaagaggtgaagcactgtgttggtagaaccacccatcgcaatatccagcgtcatagcattcagaaaagcctgacgggtggcgatgctacggggaagcacactgtcatccccatcttcataatatttataagcattttcaacaatcagtttggcagcatccttgaacagttgcgtgcgattggcatgagtagccacaatcgtaccattacccggcaatgccagtccaatggcttcgttcagacagttcattgagttagcggtaaacataccggaacaacaaccacaagaaggacaagcatgttgttctatctgagccacatcggcatcacttacactttcatcagccgacttaatcatagcatcgatcaaatccagatgctgaccgttccattcgccggcttccatcggtccgcctgaaacgaatacagtagggatattaaggcgcattgctgccatcaacatacccggagtaatcttgtcgcagttactgatgcaaaccatcgcatccgctttatgcgcattcaccatatactctacgctgtcggcaatgatgtcacgtgaaggaagcgaataaagcattccatcgtgtcccatcgcaataccatcgtcaatggcaatcgtgttgaattcggcagcaaagcatcccagcttctcaatctcagctttcacctgttgtccgatttcgtgcagatgcacatgccccgggacaaactgtgtaaatgagttgacaattgcgataataggttttcctaattgctctttcttcatgccatttgccatccacaacgcacgagcccctgccatgcggcggccttgcgtgctgaacgaactgcgtaattggtgtttcatcttcaaatctccttttaattaaaaagccttcctcacatatggtgagaaaggctcctaaattgatatcttaacgtacgaatacatacacaacctttctcacgctcttgattccaggaccacgacgcgaataatatgcaggactgccaggttaatagatgtatgtaagttcataactttatttactttactgttttcgttaatcgtgctgcaaaggtaagggcttttttataaactccaaacaatttgaagaaaaaaatgagattattatgattaatcgtaagaaaaccccgcattaaaatcttattttatcacttattcaaggcaaatctgagtaattcgctaccatgaacaggaattattcaagagggttcgaagcatttaattatctgaaaattacaagagcttacccattcgccaactaaattattcgtatctttgtcccttccaaaaagaaaaaacaggaattactaacttaaaacagtaggaatatatcaatggaaacagtagaaaacaagtacattaccgtagcttataaattatacgctatagaagatggtgaaaaagatttcaccgaagaagccaccgcagaacaccctttccaattcatttccggtctgggtctgactttagagtctttcgaagatcaagtgaaagatctgaaagcaggtgacaagtttgatttcacaatcgcttgcgcagatgcttacggtgactttgacgaagaacatgtaatcgaccttccgaaacaaatctttgaagtagatggtaagttcgatagcgaacgtattgtagccggtaacgtagtgcctttaatgacctctgaaggtcaacgtatcaacggaaccgtacaagaaattaaggcagacgtagtggtaatggatatgaaccaccccttggcaggttgcgacctgaactttgtaggtgaagtaatagaaagccgcccggcaaccaatgaagaattagctgaaatcgctcgtatgatgagcggcggtggatgcagttgcggttgcgatagctgtggtgacggttgcggtgacggatgcggcgatcacgatcaccagggatgcggatgcaatcattaatatagtgattaacggtaagtgattagtgattagcatgctgcgctattatgctgcacagtttccaatcactaatcactcaccactaatcactatttccccgtcattatctccagcaccaatttatccgtctcattcattcctttcgaccctatcttggtcagattacggatactttgatccacgtcttcatcaataataccttctacagaagttacacaacggttttccatagccatgatggcagaaagaacagcggtagatacacctgttgttactttcaacgcacagctgggcttcgcaccgtcacaaatcatacccgtaaggttggctatcatattctgaacggcataagccacctgatcgtaagttcctcccatcaaccaggtaataccacaactggaacctgtagcagcaaccacacagccgcataaagcagacaaacgtcccaaactttgtttaatatagattactgtcagatgactcaacatcagagcacgtatcagttcttcttctgatttatcattttcttcagcgaagacgagtacaggcaaagtggcagatataccttgatttccactaccggaattgctcattaccggaatcatagcccctgccatacgagcatcacaggcacctgatgtataagacaagatatgtgagaagacactatctcccatcactttatgttcataagtgccacgcaacatcttacccaggccatggccataattgccttcaaaagaacgttcggcagccgccttattcaagcgggctgtttccagaataaaactgatctcatccagtggagtattcagagcaaaatcataaactttacgtaaagtcagctccaggcactcttcctctttttcacagcttgccgtatgttgtttctgaaatagaacttctccgttacgttctatatatataaaggtggtatgtcctccggcaatcacagctattgctttatcatctccggcctcacaacatacttcaatatataatttctcttcaatattctctttcaacgaaatatgaatgcgcttttcctcaatgaaacgtttcccctcttccactacatcaggcgtactgtctttcaacacttccaactgatattccgattttccgatcaacgcccccagcgcaatagcaatgggcaggccaatcattccggtacccggaatgcctactcccatagcgtttttcagaatattagcacttagcaacacatttattttttccggctttgtccccagtgtttctgttgctttagctacgcacaatgccacagcaatgggctctgtacacccaatagccggcaccacttcctgatgtatcaggtcgattatccgttttctctccgtttccgttatcattatttcactgattttaatggacacaaatttagaaaaaatgtttttaatacgtgcgcaaagtcttctatttcaaaaaagaaacttaactttgcgcccaagttttacattattaataaccaaaaactgaattaaatgaagattaaaacgctaacctcgtgtttctttttggcatttgccatatcttcttgtatacaagacgaagcgcttaattctgaagcggccattgatggttgtacgggtgcagatgtgcaactggccaatatcaatgcgaatgaaaagatagtcgatgtatatgtacataaaggtgcagaccttgccaaacaagagttgaaattcactctaccagaaggtgcaactatcaaacctaataatagcagagacggagataccggaaacttctacaactttagtgaagctggcaattcacgttcatttaccgtaacctctgaaaatggtgaattcaaacccacttatactataaatattaaaccgacagaattaccaacagtttatcattttgaggacttgttgattgcagaaaataccccatatcacatcctttacgagttcgctccaagtacttcacaaggaatatctaaggttctgcagtggtctagtggaaatccaggctttgcattgactggaatggcaaaaagccctaccgattaccctacagtacaagtagaaggcggattcaataagaaatgtgttaagttggaaactaaaaacactggtagttttggtgcaatggtaaaaatgtatattgctgccggcaatctgtttatcggcaattttgatgtaagcaaagcattggcaggacaagaaggcgcccttaaagctaccaccttcggttttcaattctataaacatcctaaaactttaaagggatactataagtacaaagctggtcctgtttatactgaaaacggtcaaccacaaagtggtctgaaagacagatttgacatctatgccatcatgtatgaagctgatgataactcattcatgctggacggtactaatgctaaaacttccgacaaacttgtgtatctggcacagataaaagccgatgaagcactggaaaccgaccaatggactgaatttagcttaccgtttgaacgtcagaataataagtccattgatgaacaaaaacttcaaaatgggaaatataaacttggcatcatattctcttcaagtgtagaaggtgaccacttcaaaggtgcagtaggtagtacactctatatagacgaagtagaattagtttgtgaagagaactaaaaacgaaaatgattatgaagaaagattatattatttttattgcattcttactggcagtagtagggagtacatctgtaaaagcgcaggaagacagaacaaaaagcatcacacaatcctaccttcgcggatgggaatattctttgaaagcaggatttagtattggtggtaccgctcctctacccttacccgaggaaatccgtaaaatagatagctatgtacccagcatgaccatttcgattgaaggaaatgctaccaaatggctcgacgagaaaaaattatggggattaactttaggtttgcgtctagaaacaaagaacatgacgacagaagctaccgtaaaaaactatggtatgaagataatcaatactaatggcggtgaattggaaggtctatggactggaggcgtaaaaacaaaagtaaaaaattcctatcttactgtccccatccttgctaactataaagtcagcaagcgttggaagctcgtagccggaccttatttttcttatttactggaaggtgatttctccggccatgtttacgaaggacatctccgcactcccgatgaaacaggctcacgcgtagacttcagtggtgaaagcgttgcaacctacgatttctccgatgatctccgcagattccaatggggcatacaattcggtggcgaatggaaagctttcaagcatttgaatgtttatgctgatctaacttggggactaaatgatatctttaagaaaaacttcgatactattagttttgccatgtatcctatttatctgaatgtaggatttggatattcattctaacctgaataaagaaggctaaatcaaataataaaaaaatccggaagtttatacttccggatttttttatatccttatgctagtctcttattctcccagaacttccaattcatcaacaataagcgtactacctacagcacctttaaacttatcaccttctttactcgaagaacagataatagccaatttataagttttctctttatcataagccttaccttccagatattcaaatggaacattgaatgccgtccattctgccttatcagtgccatcttctaaacgcgcaacagctacacgatagtcagaatcattgatatcaacacctgtaagaataacatctttaccatcagcacctactgcttcatatagaacagcctgaatagcacactcatcctgaataccaagattatccttaatattattcttatcagagccatcaacataattatcaccacctttatacttataaactccttttaatgatagtggaattttatcataaggaattccgaactcagtcatctttaaaggggctgttatagctgtcataaaattaaaattaaacttacctgtaaataaagaacctgaagctaaaggagcatttttagcagttaaagcatttcctctcgcatctaaggtaaccaacttagcagcttttcctttataaccagcttcttccaccattacaggatatcccaccggattagcactaccattcaccattttcacaccaccattagatgatgctaactgatcggcaggttgaggagcccaatattcagcataactcccttcttttacggtttcccattcatcaagagggaacttcattaaagaggttttactaggagatatcaccttataaatagtagcagtaccatcttctgcaactaccgtataaaccacagtctgagagaaatcggcagttccaccttccacagagtaagtagccttatcagaaactttaacagtaggaaccaaagctttcaactcttctgaagtagcatcatcaagcaccttgaaagtaaatgtattagtagcttcatccaacttgggttgttcagttacaactgcattcgcttcattacttggatcaaaggcaaaactaagaatctttgcttcactactttctgaaccattaaggcgtttcccttcatataccacttttacttgttggctctccccattcacaacggcagcaatatccatatcaatctttacctgaccatttgcgacagtacctgctgcatttatagtacaagacaaagtttgcacatccagcttctgaacccctgtaaaagtgtaagtatcaccttttttagacagttcacaattactcaattcaacatcccccactggtatacccataaaactgaaatctttcaaagaaagattgatagcagcaggacccgcctttgctacagatattttttgtggaatgtcctttcccaaaagttgaccttgaactgttacattcaatgttcctttatagttacctacaatttccccatcaatcgctgtagaatagtctggatcatcatcactacaagctataaacaaactcattgaacagaccaatgcaaacaaataaaataaattcttcttcataatttttgttgtttagttaatacaagccttctctacgaaggcaataatgttctgtttttacatcacaataaatcaaggatgcaaaataacagcttttaaagaatatctaaaaggtctattctacttattaatgttctatttttaataagaagtttattaacctctttatctaaattaaaaaacaaaagtgctttgaattaaaaaaacaactaaaaacatttgattgttttcaagttcaagaattatttatagaacccaaaaaggactgtataattccatacatttacaaacacgttcacagataacatataataaaaaaatgaggatactcttccgaatatcctcatcctatttttctaaatttgaattagtttctcactaaatccaatcctaaattaaagttcgtcgtcactgaccaatatcctcctatcatctgaataaatattccagcagcctgtgcttcttctggtactacaccacctgcaaccaatgcattccaaagtataatcaagtcatttgttagtactggttctccaaaattatcagtttcccctgtactacgaagcgtgaacagattatcaaatgcactcttatctaagtaaatatgaacatggccattatcagctattttaatattcattggtatcccatctttagcccaactcgttatttgattaatggtagcattttgtattccactaagatcagcattcaacaaaccaccaagcaaagctttaacagtagccggatctccattcaatacagtttctataatttcccccataccacttgcatcgcttccagtagcagcagttaaaatagcaggaatattcagttttacaacaaattttccattcttttcactccaatatgccagatccttaggagaagttgtaaaaccacttgtcacaaaattagcttttacatcactcactgaaggaaaagcacccgtaaagaaaatagatattatagaagagggatccatagctatttcagggcttgcaacataatcagcaattatgcttccacttttgtctaaagtgattgaattcaagacttgaggcaaaatagaaccacccaaatatcgaaatagagctgaaataaattctggataattatcatctccagtaaattgccaatcagtatacaaggcgcctgtcataggccaattctttgtagtctcattttctgtccattcataatcctctgctgtatattctgctattttataagttccaatccaaggacttacttcatcatcatcatcatcacaagcagtaaacaagctcattgagcaaatcaatgcaaacaaataaaacaaatttttcttcatatctttgttgtttagttaataatagctccccatcactgggtaaccgtgctttttcttttatcacttttggggtgcaaaataaccgctttttatcacaccaaacaaggtcaatacattaatatttttgtcctttttttaatcttttctctaaaaagatctctctacatcaccatttccgtgctccatttatataggaaatgggaggcgtctctcccctttatccagagctacaccatttactctaaagggtgtagccatcctcggtaaagggtgtagcccttttcaatcgcccccacaagcacttttggggcaccctcaccgcacccaggacgtacttgctccgtaccaagtccgcagtttctccgtctaaaggtacttctgaccgaagaatgtacggagcaagtacggttcagatacagttcgggtacgatcctggtacaattcaacacagggtaaaaaacacctcattccataaaaaaacaatatttctttcttttcatgagaaaaaatccataactatttgttatctttaggcatccaaaagcttttattcaaaggatttggcatgaataaaccttatacataaaccattaaagcaaaagattatgttcaactcattcggcaacattctccgccttaccagctttggggagtcacatggtaaaggcatcggaggcgtcattgatggatttcccgctggtatccgcattgacatggatttcgtgcaagcggaactgaatcgtcgccgtcccgggcaatccctcatcacaacggcacggaaggaaggtgataaagtagaattcctttcaggtatcttcgaaggtaaatcgacaggatgtcccataggattcatagtatggaacgaaaatcaacattccagtgattatgataatatgaaggaagtataccgcccctcgcatgcggattatacatataaggtgaaatacggcattcgcgactatcgtggcggcggacgttcatcggcacgcgaaaccatttcacgcgtagtggcaggtgcgcttgccaaacaagcactccgtcagctgggcgtacgcattacggcatatacctcacaggtaggccccatccgtctggaagaaaattataccgcttatgaccttgatcttatagataccaatcctgtacgttgtccggaccctgtaaaggcgaaggaaatggaagaacttatttttaagatcaagggagaaggtgacaccatcggaggtgtagtgacgtgtgtcatcaaaggatgccctatcggactgggacaaccggtattcggcaaattacatgcttcgcttgcctcggccatgctcagtatcaatgctgccaaagcattcgaatacggtgacggatttaaaggtctgaagcaaaaaggttcggaacaaaatgacgtattcttcaataactgcggacgtattgaaacgaaaaccaaccactccggcggtattcaaggcggcatcagcaacggacaggatatcttcttccgcgttgcattcaagcctgtagccaccgtgcttatggagcaacatacggtcaacatagatgggatagacaccacactgaaagcccgcggtcgccatgacccatgcgtattgccacgtgcagtgcccatcgtagaggcaatggctgccatgaccatacttgatttttatcttattgaccgtactacacaattatagaagtggtagggtgttaaagtaattcaccttattatatatatttatgaacgaaatacagaaatacatttcaaagaatgaatccaagatgctggaagacctgttcagcctcatccgtataccaagtatcagtgcaaaaccggaacaccatgatgatatgctggcctgcgcagagcgttgggcacaacttctgattgaagccggtgcagacgaagcattggtgatgccctcaaaaggcaatccgattgttttcggacagaagacagtagatcctacagcaaaaacagttttgatatatgcgcattacgacgtgatgcccgcagagccgttagaactgtggaaaagtgaacctttcgaaccggaaatacgtgatgaacacatctgggcacgcggtgcggatgatgacaaagggcaagcattcatccaagtgaaagctttcgaataccttgtgaagcacggtatgttgaagaacaatgtcaagttcattttcgagggtgaagaagaaataggctcacccagtctggaatctttctgtgaagatcataaagaactattaaaagcggatgtcattctcgtatcggacaccagtatgctgggggcggacttgccctcactcactacaggactccgcggactggcatactgggaaatagaagtaaccggacctaatcgcgacctgcattcaggacatttcggcggtgctgttgccaatcctatcaacgtactatgcggcatgattgccaaagtggtagatgcggatggacgtatcacagtgcccggtttctacgatgacgtagaagaagtgccgcaggcagaacgtgatatgattgcacacattccgtttaatgaagaaaagtacaaaaacgctattggcgtaaaagaactgttcggagaaaaaggttacagtacgctggagcgtaacagttgtcgtccttcattcgacgtttgcggcatctggggtggatataccggtaaaggttctaaaacagtacttccatctaaagctacagcaaaagtatcctgccgtctggttccgcatcaggaccaccacaagatttcgcaaatgtttgccgattatattcggagtattgctccggatacggtacaagtgaaggtaacaccgatgcacggagggcaaggttatgtatgtcctatcagcctgcctgcctatcaggccgctgaaaaaggttttgaaaaagcattcggaaaaaagccactggctgtacgacgcggtggaagtatccctatcatttcaacgttcgaacaggtacttggcattaagacagtgctcatgggctttggattagaatcaaatgccatccactcacccaacgaaaacttcccgctcaatattttcagaaaaggtattgaagcggtggtggaatttcatattagcttgtaactcgtagctgtaactcattgatacgtcgtcctcaacaccttaaactctgtacgacggttaatcgcattacaaatctcctgctgtttcggtgggagattttttataaactcttctgtcaacacatctccctctttcaggaaagatgctgatttcagcgtaaacttggtcactgttttaggttgctgttcaccatatcctttcggtgtaagacgttccggatcaatccctcccttaataagatagcgtacaacagactctgcacggcgttgcgaaagacgaagattataatcatcatttcctttataatcacaatgcgcagacagttcgatagtaacattcggattgtcattcaacaactctatcagttcatccagagccactgtagattctgatgtcagatcagccttatcaaactcataaaaaatattctctatcagtacagggcgggtaatggaagatagcgggaattcaagttcatagaggcgatcctcattaatattttccgttgccatttcttctttgtcattcaaataaccacggcaggaagccagcagggcataacggcatcccggtgcgagctcttgagtgaaagtaccgtctttcttcacgtttatctttaaataagtaccatcatcccccaccaaagtaacaagcgcatcagagagcgcatctccttccttatcgtacaccaatcctttcaagacatgatgtacctcaggaaactcaaaactataaatatgatcccaaccacgggcatctccgcggttagaagaaaagaaaccccgattgggagcaccaggctcaaaagtcataccgaaatcgtcaccctgtgaattcaccggagactgcatattttcaatacgccatcgccccgtcaggctgtctgttatagcacggaatatatccagccctcccataccaggatgtccggtagaagagaaatacaaagtaccatccggcgaaaaggtaggaaacatctcatcagcagaggtgtttatttcaggtcccagattgtcgacatagccgaaaccatcgcgggttatgttgatacgccacaaatccagccctccctgcccaccgggcatatcagatacaaaataaagataatcacccgcaggagacaacaccggatgagcaacagaagaaagcgtatcattcagaattgcacatttctggggagctccccactctgccccggcacgttgagaaacataaatctcggcataagcaggtgcattgggcaaggtccggcagcgagtaaaatacattgttttaccatccgacgaaaaagagcaggcaccctcttcaaactcactattcacttccgaagcaagcggctcaggcttctgccattgtttcttttcattccgtttagaatgaaatatatcagcactcttcatcccggtaatgccgttcaggtcagtacctttcgcttcattacgggtagaggtgaaatacaagatatcaggatcatctcccgcatacataggagaataatcgctacggcgggaaacaagaataggcacccgttttacaatataccgggtaggcttctttttccattcctgcgccagacgacaagaggtgagtccgatttgtgtcagagagtctttacgttctttcccggcaggcaaggtctgtgcgtaagcaaggtaattctcataataaggtatagccgctgcatactcaccattcttacggagcatttccgccagataaaaatgagagagagtatccggataacgataacggacagcattcatataagcacctttagccttcaatgtataattgatgcgacgataacaatcgccctgtttataggccagcacgccccgttgcgaacgatctttcggagaagtacgggtataggcggttttataatgacgggcagcatcaaagtattcaccacgagcatagctttgctctgcctggcgcaaactccgtcccactccacaggaagtgagaagtaaactgacagaaagaaaaaagaaaagaaaacgcctatataatctcatgctccattacttttcattgctcattctaataaactgaaaaatcggcagattattgtatctttcattccttctcgttacatttgcagaaacataccccctccaaccatgaaagacatccaaattcaagctatcggtttaatgtccggaacttcccttgacggactggacgtttgttgttgcactttccatcgccaagcggatcaatggacattccacattgactgtgccaatggttattcataccctgacaagttaaaacaaaagctcggcaccggtgcccaacaaatgagtgcgcttgaattcattacttttcacagtgcttacggcaaatttctcggtgaacgagtaaatgagttcatgaaggaattcaatgtacaaccggatattatagcttcgcatggccatactatctttcacgaaccacagaaacgcatcatgtatcagataggtgacggtgcagctatcgcagccgagactcatattcctaccgtatcggatttccgacgattggatatcatgctgggtggacaaggagcgccacttgttcccatcggcgaccgcttactgtttgctgattatgattattgcctcaacatcggaggattctccaatatttcttttgaacagggaggccatcgcatagctttcgacatcagtcccgtcaattacgttatcaactactattgccgccagataggattagagttcgacagggatggagagatcgcacgacggggtacagtttaccaacctcttctgaatgaactgaacactatggatttctatcatcagacaggtccgaaatcccttggccgcgaatgggtagagacattgatttatccaatgctggaaaaatatggattaagtttagaagacaggttacgcacattctatgaacatgccgcctatcagatagcgcgcgtcattaccactaaccctctacccactggcagcggtaaacttttaatcaccggtggcggtgctttcaataagtttctgatagaacgcatagactttctttgcccatacgaaatagtcattccggacaagctgattatcgaatataaagaagcattgatttttgctttcttgggagccctttacatggcagacgaaccgagttgtctggcatcggtcacaggagcttcaaaagacaatataggaggaatgttgttcaagatatagaatagctctgcaaactgaaagttcagatagcctgatgctctaaaagtttatcagactatctgtatccttattccgaaccaaacgcctgacgaaacgcacatccgttcttccattcagagcaaccataagcggttttacctttaataatggttcctttgccgcacaacggacaaacttgtccctcaacagaacctgtttgagttgcatctgtctgaatattccctgtctgcgaagcaccatcaaccggtgtgacaggtttagcttcagcagcctttttccgcggtttactctgacgcttaggcttcgaagcatctttttctttagcagctttcccgttcttaccgtcggcagtcgcttcctgcacagcctgtacaattgtaatatgccggttactgttatccgaaagcacactcatcacaacttcggaaaccatctgtttcagttcctcaagaaattgtgccgcattatatgttttcttttcaatctcccggagcttcttttcccagatccccgtcagttcggcagacttcagcagttcttcatggataatctgaataagttcgacgcctgtgggtgtagcaatcaggtttttcttttccttgcgaatataattgcgcttgaacagagtctcaataattgccgcacgcgtagacggcctgccgatgccattctctttcagggcatcccgcaattcatcgttgtccaccagtttacccgcggtttccatagcacgcaacaaggtagcctctgtataaggacgaggcggctgcgtccacttctcatataaatcaggcacatggggtccgctttcacctttcacaaaagcaggtaatacattctcttcctctcccgggtctttttcttcttgcgactgtgcccccggagttccgaatataactctccatcccggttccagaatctgcttaccggtagtcttgaattcaatctcttcaactacacccaacaccgtagtagtggcaaacttacaatcaggatagaacactgcaataaaacgacgcgctatcagatcgaaaacgcgacgttccatatccgtcaggttctgcggatattgccctgtagggataatagcatggtgatccgttacctttgaattatcaaaaacttttttggatttcagcaaagtagtgccatccaaaggtgtcgtaaacgtagcgtagtcacgcagtcctttcagaatgcccggacatttcgggtagatatcatcacttaggtaagtggtatctacacgcgggtaggtagccaccttcttctcatataatgactgaataattttcagagtttcatcagcagaataagcaaacttcttattacattccacctgtagggaagtcaaatcaaaaagacgggggggagcttcctttccttctttcttggttacattggtaatggcaaaaggagaattccgtatttgttccagcaatgccgccccttgctcttggctggcaataggatcaatcccccggttttcttcttcctttttgggcttcttcccggcagcgatagcttccttattcttttcagcttccagaatcagctcttcctcacttttccggattatggcagaaaacgttgtatcacgatatacagtcttcagttcccaatattgtttgggcacaaaattcgctatttccaactgccggtttacaatgagtgccaacgttggcgtctgcacacgaccaatggaaagtacctgtttattctgtccatacttcattgtatagagacgggttgcattcattccgagcaaccagtcgccaatagcccggctcagtccggcttcatagagcggttgaaactctttctgatccttcagtttggcaaaaccttcacggatggcttcttccgtcaacgatgaaatccacaaccgttttaccggacagcgtgcaccggctttctgcatcacccaacgctgaattaactctccctcctgcccggcatcaccacaatttataatcatgtcggctttctgcatgagggtttctatcgtatggaattgcttctcgtaagtaggattactgattagttttattccgaaacggggcggtatcatgggcaggcttcccaggctccatgatttccagttcggggtatattcatgcggttctttgagtgtacagaggtgaccgaaagtccaggtaacctggtatccgttcccttcgatgtatccgtctctcctgtctttcgctcctaatacatcagcaatgtcacgcgccacagagggcttttcggcaatacaaactatcattcatctcttttttagtcgggcaaaagtagtataaatcgaaagcagaagcaaatttatttgcactatgctaagatacagcccattttcgggaagcaaaggtacaaaaaagagatgaatgataaaaaatgaattaatctttaaagaataatttcttcctcagtacatttgtaccattggttgcaataacgatatagaaacctttttgcatacctgataattccagaaaattagcgttggtatcttgcaaaagcaggcgtcggccggacaagtcaacgatctcgatccgggtactcatatcattccctaagccactccaggacaattggccgttgtagtaaaacatttctgccgcagacgaggaagcatccggtaaaataccggttgaagggtcatctacgcaagcggcataaagttcatgaatcgaccagtaattgcccttagttcccgtttgcacaatcttgaattttgaagtttcttctgccgggaaagagataatttgtactgatcccgcattcttgcccgaagcaacaagtttccatgtgtcgccttcaccggtactcagatacaattcataacctgccggaccatcattcggactcttcgatgtgtccagaataatccggttcagtttctgtgccgctcccatgtccaccatcacccactgtccggcttgctgcgaagcgcttgtatcccaacgtgtggaggcatcatcatcaatggctttacccgcatttgaattgttcgtactggccgtgatcttccatttcagacgatttaacagtgcatccgtagtagtgaaaacaggtgcaatcgtcaagttattctcccacacagctatcttatcaatagttccggcagccacatcggttacagtagacgtaacagaagcctgcttctcgtgtccttcgctaatgaaagtagcctcgtctttcatatttacgacagcattgtgcaaaacgatagtacctgtagtcttgggaaagttcatgaaggaagtccctccggacgtactgaagttcaccagattcagattcatttttccactttccacaacgacaccatgcttggcacttccccaaaaatccgcaccaaaaagagttacctcacccgaaaagcctgcacgagtagtcagaaagcgggtttctgtatatgtgttactttgatcctctagggctacaacctgagaattaatcatatcaaagccagccggatcgatcgcctcgtaaaccacggaattccaggaaccatcaatacccaatccaagggagcaacccgatgcggctttaccctggtcggcttgaaagacaatgccctcgaaaccaccatagtggaagtcattgtacaaaatctgattacggcaatcgcccacggtgatgaaacgtaattctgtctgattctgccaataagccttgtcctgatctgcttttgcactgttgggccatgagccaaactttgtttcttctccacaagcatacactatcgtattgaactgcatattgcagacccgcccaccttctgaaccaccaccgatgcggattgcattcatgaaaacatgtcctgccagataatcgacataatgattgtcacatttataagtaaacaaatccagaccgttgtatgcagcacgcaaacctacattcactacatacacatcctttcccagcgcctgaatacaataaggatattcagttacagtaggcaatgcggaagatacctgctcgggatagtcaaacgacaatccacgcacgccactaccagctgagagtttcaggaaagcctctccttgtgcctgtccgcgccctgcatagacttcaagaatactgccatgcccacgtggaatagtagcaaaatcagaagcgccccgcagttccacacctgtaggaactgtcagattccccagcactttataacgcccgccgggcagatatacaatacctccaccttcactggcagccttatccaatgccttctgaatagcttccgtgttatccttagccatctccagtcccgaacggatatctatttgaagccacatactggttgagctggcagtaaatggtaccacaaagggttcggctccaaagtcaagtacattatacaacgccatacgcaaaggcttggtttccggtactttcatttccgggaactccggcaaaggcttcatctctacaggcgtatgatcaatgcggcattcaaagagggattgattattgatatccgctttcttcgcaaaacgattacctgtaaggattgcacgggcatcagaaccaatatatacttgcggcgcgtcattattaaagtccgtatccgaaacgatgagatcacctcccaaaccttttacttcccccttattgacagtacactgctgcatcatcaatttagaagaaatgccttgttccagcaatactgccgcatccgaagcagatatttcacacccatagaactgtaccggtccagtactggcggatgtcactaccacacctttttcgcaatcttcaatgtgggcccgtgtaaacatgatacctgccgatgaagtaccatccacataaatacccgtctcgcagttccgcaaattgaactcataattatgtccgttaggtgcaccgtctcctcctacgcaaagtccggtactaaaacctttattatagccttcaatatccacatagcatgtatacgaccagtcgttacgacgcatcacaatgcctgttccatgcttatagatccagtcagcataggctccacctgcctgcggcgctccttccagaccggagtccgcccaataatcgggtgagaaatgtatccactcaaaacgccctacatcggctatatggtcaatctctataccacatgacagcggagtgccatacacatcgtagatattgggacaaccgcccccgtttttcctcgacagcacgatgccgctataagaattcaccaatgtcacatgacgcacattgcagtaatcgtttccccatacgccctcacgcccgtacaagatagtgggcggataaggttttatattatcaggatcctggtgcggataccagatagtcaggtgtgtcaatgcagtagacggttccatcgtgataaatgcaccggattctgtctcagatccactttgcgtatctaccatcaggatggttccttccaccggcttgcctttcaccggccgtttccattctccacgcatcgtcacaccggtaggaatgaacaactttccggaaatacgataacgaccagccggaacaaacaatacaccaccacggcgattttcgcctaatttagtcaatgccgtctggaaagcatccaacgaatttttcacacccgtaggatcggcattaaagtcagtagtcacagtataggtagccacccctacatcctctgccggatattcatccgacgcgattaatttccagttaccgaatttatcagccgactgcgaccttacacccaaagccgataaggctaacaaactaagaagtagtaatttcttcatgcgatattattattagattatggttcttctataagcaagaataatatcgcaaagatgtggtgggacagttaataagagaattaatctggaattaaaaacaaactaattttcgtgtacaccgcttaaaaacaaaaaagaggttgtgtcaaaacgttggcacaaccttttttgatgatttacagtcctgctatatttccttttgtctacgccgcttttttctcattcatttggtaacaagttgctatattcccgttgtatcgagttataaatagcccaataaatatagatttagcaagtgtaatgaactcctttcctgcttttctcagtcttgcacacatctttttgatattaaaagctatggcaaagaaggcaaagtccattgtcaccttgtcttctcccacatgccggaacctcctgtatgccatgttgtatttcatttgtccgaaaacagcttccggttctatacaccgcctgcctctatgcctgattccttcttctgagagtaacctttcccgtgcctgccgtttatattggtttaaccggtggttgacttctataatacggttcccctgtgctttaaaacaacttccacgcaaaggacagccttcgcatctttgtgctttgtaccgggcactttcggtgatgtatccgctcgctgttttgtcacgtctggttcctatgcggttcatgtgttgccccatcgtacaaacgtaataatcctcccccgcattgtaatggagactttccgcatggaacgggttgggagtataacggggacgctgctctttatggaagtagttgtacttgacaaaggcctctatcccgttttcctgcatgaaccggtaattttcttccgagccgtaaccggagtctgccacaccgatacccggtaagcggttatagcggtgctggaaggagtggaagaaagggatcagggtcagcgtatcggtggggttgggaaacagccggaagtctatgatgaactggttttcagtgcctgtttgtaaattatacccgggcttggtctgcccgttcttcatggcgtcttctttcatacgcatgaatgtggcatcaggatcggtcttggaataggaattacgttctccaaggacttcaaggtgattgtcgtattccatcagcttgtcacgatacccttcaagttctctgacctgtttctttttttcacgcagagctttcttttgttccttgtcctgtgttgcaggctggtgttccagcacttctttgagttcatccactatattagagagcatggcgggagtcaactccacggatgtgtcttttacagagttctcctgcacaatggcttcatccacctgctccagaaggatgcgaatcttattcagcaaccttgtacggttcttttcgactgttttgcgccagacaaaagtatatttgttggccttggactcaatcttggtgccgtcgatatactctacgtcaagactgatgaaacccttgtcagctaggacaagaaccaactgcgtgaagacgttgtttatctcctcctttacacggttacggaaacggttgatggttatgaaatccggatgctcatgaccggcaagccagatataatggatatcacgcaaaagaagcttctctattttacggcaggaatagatattattcatgtaagcgtagataattaccttaagcatcattttaggatgataagctgagcgccccgcttctttataaagcttcttgaaattatcaagattaagattatcaacaactgcattgactatgcggacaggatcgtccgcagctatgttttcatcaattctttgtggaaaaagaacggtttggttgggaatgtaaggacgaaaatgtaactttgccataacgaaaaactttatgcctaaagttacaaaaattttgggtaataacaaagcccgggcttgagaaagtctgggctttgcgcataaaaagagggtgtgccagcattttgacacaacctcctctctaaaattatcgaaattatcaataaaagctttattcttcgtccatcaggatttccagaatctggcaagcagccttggcaaccggagtaccgggaccaaagatagcagctacaccggccttataaaggaaatcataatcctgtgcaggaattacaccaccggcaattacgatgatatcctcacgacccagtttcttcaactcttcgatgatctgcggaaccagtgtcttatgtccggcagccagtgaagatacgcccactacgtgaacgtcattttcaacagcctcgcgggcagcttcggcaggtgtctggaacaacggtcccatatccacatcgaaaccacagtcggcatatccggtagctacaaccttagcaccacggtcgtgaccgtcctgacccatcttggcaaccataatacggggctgacgtccctctttcttcgcaaacttttcagtcaactcgcaagcacgcttgaagtcactgtcattcttactttctgatgaatacacgcctgatatagttctgattattgctttataacgtcctacaatcttttcgcaagcataagagatttctcccaatgtagcgcgaacacgggcagcttccactgccaattccagcaagttgccttccttggtttccacgcatttggtgatagcctccaatgctttctgcacttcagcttcattacgtccttctttcagacgcttcaggttctcaatctgttccagacgaactgctgtattgtcgatttcaaggatatcaatcggagcttctttctccaagcgatacttgttcacaccaacgatagtctgagaaccggagtcgatacgggcctgcgtacgtgcagctgcttcttcgatacgcatcttaggaataccggtttcgatagctttcgccataccacccaatttttcaacttcctgaatgagttcccaagccttgtgagccagctcgtttgtcagagactctacatagtaagaaccaccccacgggtcaacattcttgcagatataagtttcttcctgaatataaatctgagtgttacgtgcgatacgtgcagagaagtccgtcggcaacgcaatagcctcgtcaagtgcattggtgtgcaaagactgagtatgtcccagtgcagcagccatggcctcgatacaagtacggccaatattgttaaacggatcttgctcggtcagtgaccagcccgaagtctgggagtgtgtacgcagagccagagatttcgggttcttcggattgaactgtttcacaatcttcgcccaaagcatacgtgcagcacgcatcttggcaatttccatgaagtggtttgtaccgatagcccagaagaaagacaggcgcggagcaaaagcatcaatatcaatacccgcagctgttccggcacgaaggtattccaaaccgtcggccaacgtataagccaactcgatgtccgccgtagctcccgcttcctgcatgtggtaaccggagatagagatagagttgaacttcggcatcttctgagaagtatattcgaatatatcggaaataatcttcatggagaatgcaggcgggtaaatataggtattacgcaccatgaactctttcagaatatcattctggatagtaccggccatttcttccaacttagcaccctgttccagaccggcgttaatataaaacgcaagaatcggaagaacagcaccattcattgtcatggatacggacatcttgttcaaaggaataccatcgaagagaaccttcatgttttccagtgaacagatagatacaccggctttacctacgtcacctaccacacgttcgtggtctggatcgtaaccgcggtgtgtagccaagtcaaaggcaacggacaaacctttctgtccggaagccaggttacggcggtagaatgcattcgactcttcagcagtagagaatccggcatactgacggatcgtccagggacgcagtgtgtacatcacagagtacggaccacgcaggtaaggaggcaaaccggcagcatatcccagatgttccatgccttccaggtcttcctttgtataaacaggcttcacttcaatgtgttccggcgttttccaatcagcatggatgccgttagccttttgccactcagcaccgtttgcaggctgaaatgcggcatatatatctaagttcttaaaatcttttctcatcttacttcaaaagtttagcgttgaattcctttaatgtttccagcacgttaacgcgaacatggataaagttctcgataccgacagccttcagttcttccatgttggcaggagcaccggctacgataaatatggcacggccatccaaagccttgaaggcaggaacagcatattctgcatattcatcgtcactcgaacacaataccacgatgtcagccttggcagccatagcggcctctataccggcttccactgtggggaaaccaaggttgtcaaccacctcatatccggcacaagccaggaagttgcaagagaactgagcacgtgcctgacgcatagccaagttaccgatagtcaacataaatgctttcggacgcttaccggaagcttccgtttcgagacgcaacgcttcaaattcactggcagcacggtcgaaattcaatgtctgaacatctttttcgcaagtgtcatgaccaccgcagcagcaagtagcttcaagcggtttcttctcacctgccttctcattaaagttcgggaactgattggtacccagcaatacttcgcgacgctgggcaacagctttatgacgggtcttgttactttcgttcacggcagcctgcaccttacctgcttttactgctgtatagaaaccgccttcttcttctaccgcaaggaagagttcccatgcttgtttagcgatggatacagtcaggttttcaatataataagaaccggcagcagggtcaatcaccttatcaaagtgagactcttctttcagcaacaactgctgattgcgcgccatacgttcagagaattcatcaggagccgcatacgttttgtcgaacggactcacagtcattgagtccacaccgcccaaagcagcactcatggcttctgtctgcgtacgcagcaagttcacatgagcgtcgaacaaagtaaggttgaatgtagaagtctcagcgtgaacacgcatcttggcagcacatttagcctccgcatcataagaagccacaatgtttgcccacaacatacgggcagcacggaacttagctatttcgaggaaatagttggagctgataccgaaattgaatttaatcttcctggcaactacagcagcaggaactccggcttcagtcagttgattcagatattcattaccccaggcaagagcataccccaattcctgatagatataagaaccggcattattcagtgtcagagccgttacattcagtacacggtattccggcagagcatcggttgcttcaatcaaggctttggctgttgccagcatatcgcccttttctttacctttggccagcatcttgtcgaagaaatcatagccgatagaaccttgcaatttcgtcaggtcatatcctttcttccggaagtaagccaccaggatttccgcaagttccactacatgtccctggcacgtgtagaagttcagttccacacactcggcgcagataccttcgagcaatgtctcgatgtattcggcattgagctctttcgccttcacacggaacgccagtgaatctacgcctttattcagaatatccagcgcttttgtgttagcttccttcgggcattccaccttgatttcctggcgtaccagccattcgttgttgtctttcttggtgcctctgagataagggaattcaccgggaagtgcatccgtcgttttcagtccttcgaggtcttccatgcgatagaaaggtttcaccttgaatccttcgtttgttttccaaacgagtttcttctcaaaatcagcgcctttcaggtcggctgtaactttgtccatccactgttcggtggtggtgggagcaaagtctgagaagagtttttctttactgtctgccatagtttattttataattaaaaagataatgagtaatctcttcacttgcctatttgtctaaaataggacttgcaaatatactcaataacttaataacacaaggttttttaagtaaaattcgcatgaagatatgacattctggaagcatgatttccgtatgtatatgcatgattgcaaagtgcaccttacattttagagtaaaaacttatattcaagcatactactcaattatcctctgcccatgcctgtactcaaaagaaaaactcccggaaaccctttgctacctcccttttaatgcctacctttgcgcgaaatttaataagcaaataaaaaagataaacaaaagtaactatggattggttagagagtttgttatgggaccctgcctccgtcgcccatatcgtatgcttgtatgcattcgtaatatctgtcggcgtgcttttgggcaagattaagattttcgggatatcgctgggagtcacatttgtacttttcactggtatcctgatgggacatttcggctttacgggtgagacacacattctgcacttcatccgcgaattcggattaattctgttcgtattctgtatcggtctgcaagtaggaccgtcgttcttctcttcctttaagaaaggaggcatgacactgaatatgcttgcagtaggtatagttgtactgaatattgcagtagctttgggcatttacttcatcgacggaggaatcgacctccccatgatggtaggtatcctttacggtgcagtcaccaatactccgggtttgggtgccgcacaggaagcattgaatcaactgaactacacgggtgatcccatcgcattgggatacgcctgcgcttatccgctcggtgttgtcggtatcatcggttctattattgctatccgctacatctgtcgggtgaacctgaaaaaggaagaagatgaactctctacacagacttctgatatgaagcacatgccgcacatgttgcatctggaagttcgcaatgaatctatcgatggaaagaagctcctccagatcaaagagtttatgggacgtccttttgtatgttcacgcatacgccacgatggacacgtcagcatccccaaccaagatacggaatttcatatcggagaccaggtattcatcgtatgctccgaggaagatgccgaagcggtaatcgcttttatcggtaaagaaattcaagtggactgggaaaaacaagatatgccaatggtttcacgccgcatattggtgactaagtccgaaatcaacggtaagaaactgggtagcctgcattttcgtagcatgtatggagtgaatgtaacccgcatcaaccgttccggtatggatttgtttgccgatccgaatctgatattgcaggtaggtgaccgcgttatggtcgtgggtcagcaagatgctgtagaacgggttgccggtgtattgggcaaccagttgaagcggctggatacaccgaacattgtgactattttcgtgggtattttcctgggtattctgctaggtagtcttcctatcgctttcccgggtatacctactccggtaaaactcggtttggccggtggtccgttggtggttgctattcttatcggacggttcggacataaattgaagctggtgacttatacaaccatgagtgctaatctgatgctgcgcgagatcggtattgtacttttccttgccagtgtaggcatcgaagctggtgaacactttgtacagaccgtagtagaaggttccggactatcatatgtaggctatggtttcctgattaccgtaattcctttgctgattatcggtatgattgcccgcttttattgcaaagtgaactatttcactttaatgggattaattgcaggtagtaataccgaccctcctgcactggcgtatgccaaccaggcatccggtaacgatgctccggcagtaggctattctacggtttatccgctgacaatgttcctgcgtattctggcgggacaaatgatattgctgacaatgatgtaatacaagttgcattttagcaaaaagagaggtcatgttcgcatgacctctcttttttaatttcaccagattataaataactccgcttcacttgattttaagtttcacaaactcctccacgaaatctattgttttttcaattcccagcaccgaagaatcaatgcagagatgataagttgccgcagctccccatgtcttgtaactataataattgtagtactccgaacgttttttatctgccttgctcatcatattttccgcctcttcttccgaaatgtgatgcatagcgcaaagacgggcaacacgtgcctcatgcgaggcagaaataaagatattggcgcaacggggatgctcccggagaatataatcggcacaacggcctacaaaaagacaagacttctcagaggccagctgacggatcacatcactctgcactttgaaaagcgcgtcattactaagacaattttgggtaggtaaggcgccatctcccacaaaagggaaacgcataccgaaaagtccgccgatgattccctgcgaagcacgttcatcagctttctcaaaaaattcacgacagaggccactctccttggaagccagagttatcaactccttatcatagaaatcgatgcccaagcgggctgccaacttctcccctatctcctttccgccgcttcccaattggcgaccgatgttcacaacgaatttcttattcatagcttcaatctaaatattggtttactgatagcaaaagtaaggatttataggaaagaaacaaaaaaagtcacacgtttttcgccctatccttccgctctcttgaatttacggaactgccttaccaacattaccagcgctaccaggctggcaagtaaatcggagaatggcatactataccacacacctgccgcaccaaagaaacggggcaagattatcaatgccggaagcaggaaaagcatctggcgcgtaagagaaaggaaaatagccttactggccattccgatactctggaagaagttggacgtcaccatctggaaaccgataatagggaaaaacatcactacaatccgtaaaccacgtgccgaaattgctatcagttcctcgtcagaagtaaatatagaaacgaccttttcgggaataagcattcccatcagaaaaccggaagtagtgacaactgtagcaaagatgattgtcagtttcaatacccgggagacgcgcgcatattgctgggcaccaaagttatatccagcaatgggctgcataccctgattcagtcccatcacaatcatcacaaatataaataccagtcgattgacaatgccgaatgcaccgatggataaatctcctccatagcgcttcagcccttgattgataacaatcacaataaaacatgccgccagattcatgaggaaaggagacataccgatagcaagcgaatccatcacaatcttacgacgcaagcggaaaatgccgcggtgaaagtgcaagagttcgtctttattgctgaatatcttgaattgccacagtaatgaaatgacctgggcaatgatagtggcaatagcggctccacggatcccccaaccgaagccataaataaatagagggtcaagtatcgtgttgataacaaccgtagcaatagtggcatacatcgctttctgcggatgtccggaagaacgcaacacagcattcaagcccagataaaggtgggtgacgacattgccaagtaaaatgatttgcatatattcgcgggcgtacttcaccgtctcatcactaccgccgaagaagtaaaggatgggatcgagaaatatcatcgtcactaccgtaaatgctaatcccagcactatattcaggacaagcacattacctaatatccgttgagccgtatcatagtctttctgccctaactttacagaaaccagcgtagaagcgcccactcccaccaacgaaccgaacgctgctgcaagattcatcagaggaaaagtaagtgccagtcccgaaatagccattgtgcccactccgtgaccgataaaaatgctgtccaccatattatataaggaagatgccgtcatggcgataattgccggcactgcatattgcatcagtagttttccaatcttttctgttcccaacgctgtgggtgccttttgtcctgtcatacctatttctttattttcagggcgcaaaggtacttattttcccgcaagcaaacaaaagaagacgagaaatagatgatttgtagtgttatttcttcaagaggtatatcatgctaatttcggctattatggttcaatagatatcaccgatttgattatacaagaagttatgcaaaacaactaatacactatatatcaagcaaataaatttcaatcaaatacaataataaaaaaaaatggggttcattcgggttcatttggattcaaggttcactatgaaccctacgtgccacgtatttatgtggggaaaaagctgtttttgtaatataataagaactatttatagaccatcttcgcacccgttcatcttcgtatcccgacagagtatagtcagacacatttgcaatacagtattattttcgtacattacataataaatgggagtgaacctacaccccaaaaaacgcatattattcacaaaatcaaaaagcaattaacatactcattatctgacgattaataaaaatttcagaaatttcatactgacagataggggtcatagtgaaccttgaccccggtgaacccggcataacagtaaaacgatgttacaataaacgaatatggatgcaatatcatccccctatcatctatcccactaaaaaatcaactattaaaagagcaaacaaaattatagcaagagggaacaaaattattgcagaagcaaatgaatacccataaggttcattggaaaatactcgaaaatataaaagtcacatataagagatgattttgctaaataatataagaaggaattcgtgaatacaaaagtttggaacaagtccgtaaaattcataaagaggcagccaatgaatctgctagttggggtatttttcgccctaaacttttcctaattctcccctccttcgtgccattatatgaaaaatgtttcgtatttttgtccccaaattgtgttaatgtacaacgaaatgaatgtattagaactaagtgaacaggaaatcattcgacgtaatagtatgaatgaacttcgcgcgatgggcatcgagccctatcccgctgcagagtatgtaaccaatgctttctccactgatataaaagcagaattcaaagatgacgctgaacctcgcaaagtatccgtagccggacgtatgatgacacgccgtgtgatgggtaaggcttcgtttattgaattgcaggactctaaaggtcgcattcaggtatatattacccgcgacgatatctgtccggaagaagacaaggatctctacaacactgtatttaaacgcctgctcgacttaggcgatttcattggaatcgagggttttgtattccgtacccaaatgggcgaaatcagtatccacgcccaaaagctgactgtactggcaaaatccatcaaaccgttgcctattgtaaaatacaaagatggtgtagcttatgactcctttgaagaccccgaactccgctatcgccaacgttacgttgaccttgtagtgaatgacggcgtaaaagaaacattcctaaaacgtgccacggttattaaaaccatgcgtgctgtactggacgaagccggctacacggaagtggaaactccgattctgcaatccatcgcaggtggagcaagtgcccgtcctttcatcactcaccacaactcactgaatatggatctgtatctgcgtattgctaccgagctttacctgaaacgtttgatcgttggtggttttgaaggcgtgtatgaaatcggaaagaacttccgcaacgaaggtatggacaagaaccataacccggaattcacctgtatggaactgtacgtacaatataaggattacaactggatgatgagtttcaccgagaaattactggaacgtatctgcattgccgtgaacggcagcgaagaaactaccatcgacggtaagaccatcagcttcaaagcaccataccgccgcttacccatcctggacgctatcaaggaaaagacaggttacgacctcaatggtaagagtgaagaagaaatccgccaggtttgcaaagagctgaaaatggagattgacgacaccatgggtaaaggcaagttgatagatgaaatattcggtgaattctgcgaaggcactttcattcagcctactttcatcactgactatcctgttgaaatgagtccgctgaccaagatgcaccgcagtaaaccgggactaaccgaacgttttgaactgatggtgaacggtaaagagcttgccaatgcttatagcgagttaaacgatcccatcgaccaggaagaacgtttcaaagatcaattgcgattgagtgaaaagggagacgatgaagcaatgttcatcgaccaggatttcctgcgtgccctgcaattcggtatgcctcccacatcaggtatcggtatcggtattgaccgtctgacgatgctgatgacaggcaagtcgtatattcaggaagtactgttcttcccgcaaatgcgtcccgaaaagatcactccgaaagatgctcccgccaaatatatggaactgggcattgccgaagactgggtacccgttattcagaaagccggctacaacacaatagaagatatgaaagatgtgaatccgcaaaaactgcaccaggacatttgcggtattaacaaaaaatacaaactggaactgaccaacccgtcggtaaacgacgtagaaggctggattgagaaaattaagaattaaagaattaaaaattaaataagaagattaaagatcgaatgagggaaaggagtttcctttcccccttttaatttttaattattaattattaatttcgatatgaaactacccggaaagatagccataatgggcggaggaagctgggctacagccattgcaaaaatggtacttgctcaggctgagtcgattaactggtatatgcgacgagatgatcgtataaccgattttaaacgactgggccataaccctgcctacctgacgggcgtcaaattcgacatgaagcgcatcaacttcagctctaatatcaacgatgtagtaaaagagtctgatacgctgatatttgtcaccccctccccctatctcaaagctcacctgaagaagctgaaaacgcggatacgggataaattcatcattactgctataaaaggaatcgtacccgatgacaatctgatcgtatcggagtacttcacaaaagaatacggcgttccacccgaaaatattgctgtactggcaggtccctgccatgcggaagaagtagccttggaacgtctctcttatctcaccatcgcttgtccggatacagacaaggcatgtaccatcgcccgccgcctggccagttcatttatcaaaacatccgtcagcaatgacgtagccggtatagaatacagttctgtactgaaaaacgtgtacgccattgccgccggtatctgtagcggtctgaagtacggtgataacttccaggcggtattgatatccaacgccgtgcaagaaatgaatcgtttcctgcaaacagtacatccgctgaacagaaacgtgaatgattctgtttatttaggtgatttgttggtgacaggatattccaacttcagccgtaatcgcacgtttggtactatgattggtaaagggtattctgtaaaaagcgcgcaaatagaaatggagatgattgccgaaggatattacggtacaaagtgtatcaaggaaatcaacaagcatcaccatgtcaatatgccgatactggatgctgtctataacattctgtacgaacgcatttcacccatgatagaaatcaagttgctgactgattcgctaagataatctctcccttaactcctcttccgcaaagaggagaataaagccagagttgcgatataaagaaaagaatattataaataaatcttataaaccaaaagtaactcaaacctaccttttccacagggaagggggcaggtaagaggcttttaaaacctagaatattatgattagtttgaacatcgaaaagacttttggatttatctccaaagcatctgttgctgcttacgaagctcaggtaaaagctgcgcaggaagcattggaaaacggtaccggaaaaggtaatgacttcctgggctggttgcacctcccctcatctatcagccaagagcatttggccgacctgaaagctactgcacaagttttgcgcgacaactgtgaggtagtaatcgtagccggcatcggcggaagctatctcggcgcacgtgcagtcatcgaggctttatcaaacagcttcacttggttgcaggaaaagaaaactgctcctgtaatgatctatgcaggacacaatatcagcgaagattatttgtatgaactgactgaattcctgaaagacaagaaattcggcgtcatcaatatctccaaatccggaactaccaccgaaaccgctctcgctttccgtctgttgaaaaagcaatgcgaagaccagcgtggtaaagaaatggcaaagaaagttatcgttgccatcacagatgccaagaaaggcgctgcccgcatcactgctgataaggaaggttacaaatcattcattatccccgacaacgtaggaggacgcttctctgtactgactccggttggtttattaccgatagcgatagccggtttcgatatcgagaaattagtagccggtgccgctgacatggaaaaggcttgcggcgtgaatgttccgtttgccgagaatctggctgcgcaatatgctgctacccgtaacgagctgtacaagaatggcaagaagatcgaaatccttgtaaacttctgcccgaaactgcactatgtaagcgaatggtggaagcaattgtacggagaatctgaaggtaaggaaaacaaaggtattttcccagcagctgtagacttctctactgacttacactctatgggacaatggattcaggaaggtgaacgtaccattttcgaaactgtaatatctgtagaaaacgtaaaccacaagttggaagtaccttctgacgaagcaaatctggacggtctgaacttccttgcaggtaagcgcgtggacgaagtaaacaaaatggctgaactgggtacccagttggctcatgtagatggtggtgtgcccaacatgcgtattatcatcgagaagctggacgaatacaatatcggtcagctactttacttctttgaaataggatgcggtatcagcggttatctgctgggcgtgaatccgttcaatcaaccgggcgtagaagcatacaaaaagaatatgtttgcattgctgaacaaaccgggatatgaagaagagtcaaaagctattcaggcaagactgtaataagtggagagttgagagtggagagttgagagttggctacgcgattataatgcatagcaactctccgcattccattctcaactctcaacttccactctcaactctcaactctcaactctcaacttaataaatgtttcaagaagccatttcccgctatcttcagtccagcgggtactccagaattcatttgaaatccgtccttttcgatatggacggcgtattattcaattccatgccttaccatgccgatgcctggcacaaggtaatggaacgccatggattgcacctgagccgtgaagaagcttacctgcatgaaggacgaaccggagctgctactatcaatatcgtctatcaacggcaatatggaaaagatgccactcccgaaatgatacagagcatttatgcagaaaagagtgcagaattcaacagtaaccccgaaccggaacgtatgcccggcgcatgggaagtactacagaaaataaagtcggatggactgataccgatggtagtcactggttccggacaacactcactattagaccgcctgtcgcataacttccccggcatgttccgtcgcgaactgatggtaactgccttcgatgtaaaatatgggaaaccacacccggaaccttacctgatggctttacaaaaaggaggattagcccccaatgaagctatcgtagtagaaaatgcgcctatgggcgtacaagccggtgcagcagcaggtatatttacagtagctgtcaacacaggtcccattgacggacaggtcttactagatgccggagcaaatgtattattcccgtccatgcaggatttttgcgacaattgggagaacttacgtaaagcgttcgaataaagaaatcggacgctttactatttatggaaaagaaaatattttatctcaatagttcactgatttttttccttaaatttaactttattatttcatcaggttttaactcaagctctatcaaaatcttggcagtagagagtttataagcttcattttccctatcataattcatctgttctttatcgatagaatagagcagggcaaaatcataatccaaagcttttgaaacattatataaagtatctgtatcaatactttttcgtgtcaacatatagtcaacactctgaggcttaacttgcagtctccttgcaagttcagcctttgtcaccagtttttcaaccatgacattttttataacttcaccgatgtatatagtagtcttttccatttccatgaaggtacgatttattatccaaacctagaggaagtgaaataaaaatttatctgtcctgtaatacctatttattcacaatccacttgttttatcaaataaattgtgatacttttgtcgcagaatgatataaacaataaataatcaaattaccatgactctactgattcttattcttatagcgattcctgtttgtatcttgacaattctattatggatatacaatgattataaaaagtacaaaagacagaattgcttcttgattttattgtttttggctttacctgccactatacaagctcaatacacagacaaaaattgctgtgtaagttctaaatggcatgaaaatccaaaagaaatattagagcatacggctggaagtttcaccacttcccatggttgttgacaataaaccacaattcttcaataccttcaattttatcattacgccaatcaaaattgattatgatactccaagacattaaaagccgccttaacgaaacgcgaaactggtacattgtactgacattgccccgaaaagaaagaaaaaccaaaggaactttggaaaataaaggcatgataacttatctccctaccatttacgtaaaacgcagatggaaagaacaagtaaaagaaatacagattcccgctgtaaacagatgcgtatttatttacgctaccggtacagagctggagggactaaaaggaatatatcctactcttccgatagaaatgacggaagtaggacattagagttgactttacaactggaaagggaaaaagggggacaccgtgatggtatccccctttttgttgtgtgaccccggtgcgattcaaacgcacgaccttcagaaccggaatctgacgctctattcactaagctacggagccttaaatgcggggacaaaagtataaaaaaatcgggcatattcctaatgatttgtctttttttacagtaaaagcctataaataagaatattattttgagagccacaactggttaataagaaacaaattgctcataaaattagccaaatacgatgcaaatataaatattatacctatatttgccggacaaaaacatagtacacacttatgagttatctgataaaaccagagggttataaacccttattggacttaaaacaaacagaattaggaatcaaacagatcaaagagttcttccaattgaacctttcatcggaattacgtttgcgccgcgtcacagccccgcttttcgttttgaaaggtatgggtattaatgatgatttgaatggcgtagaacgtgccgtatcatttcctatcaaagatttgggagatgcgcaagccgaagtagtacattctcttgccaaatggaagcgattgacattggcagactataatattgaatccggatatggtatttatacggatatgaatgccatacgctcagacgaagagttgggaaatcttcattctctctatgtagaccaatgggactgggaacgtgtcatcactaccgaagaccggaacgtgaacttcctgaaagaaattgtaacccgtatttatgcagccatgatacgtacagaatatatggtgtatgaaatgtaccctcagattaagccttgcctgcctcagaagttacatttcattcatgcggaagagttacgtcaactttatccgaatctggaacccaaatgccgcgaacatgccattacgaaaaaatatggtgctgtattcattatcggtattggctgtaaactaagcgatggagagaaacacgacggacgtgccccggactatgatgactataccacagaagggttaaatggtcttccgggcttgaatggcgaccttttattatgggataatgtattgcagcgcagcattgagctatcatccatgggtatccgtgtagataaggaagccctgcaacgccagctgaaacaagagggagaagaaaaacgactggaactctatttccataaacgcctgatgaatgacacattgcccctttctataggtggtggtatcggtcaatcacgtctttgtatgttctatttaagaaaagctcatatcggtgaaattcaagccagtatctggccggaagatatgcgtgaggaatgtaaggaacacaatatttacttgatttaatacccagatacaaatagaaaaggcagagattttatgatttctgccttttctatttgtatctgttcgaagaaataaaaagaatgctctattacatgaatcagattaaaattgtatcttagcatccgaaacttttaacacacaaaattatgaacgttcaaatagaagaaagttggaaagcacgtttggaaccggaatttgaaaaagattatttccatacactaacggattttgtacgggaagaatacagtcattatccgatataccctccgggaaagctcatattcaacgctttcaatctttgcccattcgataaggtgaaagtagttatcatcggtcaggatccttaccatggtcccggacaagctcatggtttatgcttttctgtgaacgacggagttcgtttccctccttcattgattaatatattcaaagaaataaaagatgatattggtacagatgctcccaccactggaaatctgacccgctgggccgagcaaggtgtcctgctcctgaatgcaaccttaactgtccgtgcccatcaggcaggttctcatcagaaccgcggttgggagacttttacggacgccgccatacgtgtccttgccgaacagcgtgaacacctcgtattcatcctctggggatcttatgcacagcgtaagggtgcattcatcgaccggagcaagcatcttgttctgacttctgcgcatccctctcccctatctgcctacaatggcttctttggaaataagcattttagcagagcgaatgcctatttgaaagaacatggagaacaagaaatagcgtggtaaaagcaattcctaatcagaaataaagatatccccttctacactgaagccttccgataaataaatcgtttcaacagtatagaaggggatattttttatgaaaaagcaaatgcagtaaaaggaatttcaaatggattcttaataccatttaatattagtctgtgtctgactcttcttatcatatttcaaatcttgcagaatactggcattggcacggataacgaagctataatacttccatgtaccaaatggagaaagactggcagacatgctgaaacagtgcaagtcacgcgttatattgaaagaagtctgcactatctttttagcattaaagtcataaccggagttgaagctgactgcccacttattggaaatcttaacattaccattaatattaagcgcattcagactaaacttatacggataacgcatgctctctctgttgattggtctggaggtatcttctgttatattaaagcctgtactcagatttatagaccaaggcattttgaaaacctgataaccgtcatcatctacagcagctttttctttcttccgcttggtaggcgtattacttgttcccgcatcatcagtttcgttactttcactgtccgcatcagtctgttcgtttccttttccatcatcttcactcttctctccggtaaagaatgctttccacttcttccatgtatcgttattaagcgtgtaactgaaagagttcccatagccttggaaacgtccaaaacgtccgtaagaccactccgtgcggtcactcgttacaaccctaccgtttttatcaaaggtataagcataagtggcaaagactgaactcatactaaaggtatagttcttactcaatttcaaacgcaaatttaacgtcaggttactccatggacgcaccttagcagccgtattataagaaatactcgcccccaactcatcaatcaggctgaccttgcgtattgagtcattcttatccttatatttcatttccaagttattggatatctggaatgaaatatttccagatcgtccttgtcctggcactccgaacatttgtccggcatatggagaataagtgatcgtatcttgtgttccatcagcattgggtttaatataagtatcatagtaaccatagcgggaagaaccaaagtcaggagctgcactgatactgacagaaggagttatgacatgtcgaatctgtatttcctttttcttcataaacaaaggtttatacataccataaatttttgtattaacacccagactggcactatagttatatactcgatggaaaccataaatagtatcagtttctacttcccgcccactggtacctatattcggatcccagtctttcatcaccttacgtgtataccaacgctccgtataactcaccgatggagttacattgaagtacttgaacaatgtaaacgtagcgctgataggtatttcatgtttcattccgttcttccagtccttcaccagattggatttgaacagaagatcatctttcgtagtaatgctgttagaaaggcggccactatagcgaagagaaatcttctcataccatttctcattacctacagcatttttccgtttgaaaggaaaaatagtactcaaggtaatgttcaaatccggtaaagttacggcaatcgaagaatccttcatactctgtgcaatattaccggtagccgcaatagaaagtttctgatcgggaaagttacgtgaatagctgatactggatgttttggtattctgcgtcatagcctgcgcattgtacatattaccgatattagtacgctcatagctactggacgagaagttcacactggccgagaatgatgaattaggactggccttgggatcctgacgatgcgaccaaacaactttgaagtcttttgctactgtgtagtcatccaggcctttatcaccggttttagtcacctgatagctggcttgaaacagaccggagaatttataacgaacattataattggtttccgcattcaaagcccatgagccttttgtaaagatatcaccgcgcagcttcaaatccatcttatcgctgatagcgaaatagtaaccgccatccgtcaaaccaaatccacgggtagagtcatccatataacttggcatgatgaaacccgatgaataactactggagaaaggaaagaagaaaaacggtacggcaagaggcagcgggacatcctcaataaccagataagcagggcccgtcactacatttttcttggggcgtactttggcataggtcatctgcatgtagaagtgaggatgatcgtgattatcacaggtagtataacggccactcttcatgtacagctcatcgttcatacccttcttagcattattaccagtcacatacccctcgccttgctgactgactacattactgatcagcccctttttactcttaaaattataccgaatcgtattcgtctcataaggtgtatccccatctttgaagaccggtcttccttttatgacttttaatgagtcttccacaccatgggcaaaaaccgtactactgtccatattcatagtaatcacctcggcagccagctctatcttctgatagttcaccttcccatctccatataaattggcaatgccattctgagtgaacacaatagagtcagtagcttcataaatcaccggagcatccaaaggctgctttttcttaccggcaggctgcaattgtatcgtatcgttttgcagagtatcccccttcaacaaagtgtctcctctttgtacaccttctatattaaaggtatctgtccgctcgcttcctgtgggaacagttcttccacgccgacgttgcgaaaaagcctcgccggagagcaggagtaagacaagtagtagtatgaatgatatgaatgtatttgctttcaatggcgtaatcaacttatagtttccgcttgaaggggcaaaagtacgtaaattatacggataatctccctttttaaagaaatttagattgctacaagaactgttcgcaccagcgatcaaaacgtttcaaaccttcattgccgaaattagaaagactttttcgggctttctccactgttttttcccgctccagatgagtcttggaataaaacttatcggcaaagcaaacgacttgctcttccaggctaaccgggagcatatcccgatgaggtactggcagcttttgcgaaataatatcgtccaaagatagccctgcacccgtatgcctttcacataccaatgcatgacggggatatccttcctgacgcatcagatccgcccctaaatagccatgacagacatagggctgatctccaaaacagaagatacccggagcattagtcagaaagatgcctatatcatgcagcatgccggcttcatataaaaagtctttatccaactgaagctccggatggtgatcagcaattgaaagagccttctcggccaccaaacgactatgcaccaacaagatgtgtttccgttcattatcctccggataatatttatcgatgattgtaacgggtgacatttatttctttttaaacttatacatataaatctcatcacgcaaatcgcaactgcgcttcttcgtaaggaaaatctcttcaaagtcgtatgtatttccaaattcttcaaacaacagttcttttcctctctccggcaaaacaacatatccctcaccggacggcaaatccttctcaaaatgacgcatctgatcattcatataaaagtttgcacaatagaagctcatgccatcatatgagtagactgttccctgcggcacatattccctgatttggttaaccaggtgcttgtccgatttaactgccaacactgtaggttgatagaccccatccagagaaacaaaaagacaaagcatacatccggcgatactgtataataaggagtaagcgccggtccgcttcgctactcccatccatgtgcaggcagccgctatcaaaggaagcgccaccagacaccatttaggaatagacagagaaaccgcttccaaagcatgcataaaagatacattttcagcagcatgacggccggttccaaaaagactatccggtatcagtcctaaacgtaccgctatgaaagttaccgtaagtatcaaacacaaagacgcaaatatatgtgcagagattttaaacacttttgccccacgctgcaccaaagccaataaatattcagctatcagcactgccataaatggatagatgggaagcagataaacgctacgtttactcttggggatgcaataaaatatgaaaataaagagaattaccacccatgtgaacaattgcaagggcgactgtgaacggaattttgtccaggctttcccgatacgttcgccgaaagatatcccctcaggtaacacacgcatatttttccacttcagtccaaagagagagatcagcaataccaaagtccagggtatccagccccagataacagtcaggaaattataccatatcggattctcatgtgatccgtaggacatctttcccatgaagcgaccggtattctcttccaacattaaatcgacaaaagactgtccgccttgtgcataagccgcgcccgcccaggctgcataaggaatcagagaaaggattcctacaggcaataacaagaagaatgtcttccagaaagaacgtccacgcaacaactggtaaagaccgatacagacacatgggaatatagaacctaccggtcctttggtcaatgtggcacagcccatcagtaaaacagccagccagggaataccgcggcactccttctcatcccaacgaaacagcaaacacaatgaaataacaataaacgacacttgcaacatatctacacggcaagccaccgctgcccggtgtacttcaaaagaagacagaagaagaatagaagtcagaaaagccgtttttacccctttacgttttgctataaaagagaagaacaccaactgcatagccaggaatgcaatagcagacggcagacgggatgaatactctgacactcctccaaaaagggaagagatggcagcgatggcccagtagaggaaaggaggcttataagctatgtcggtaccataattcaccggaagtatccagttaccactctctaacatagaaaaggcaacaatggcctcacgtggttcccctttagaataaaaaatggtttctcccagaaaagggagtatcacaagcatactgagtagcgctataaaccagaacgctttcttcctatcatctgacatatatttctgtttttagtgatttctgtgcgcaaaagtacgaattattctgcaacaatccctaactttgccttctcaattctatgaatatgaagagactgaaaaaactgccggaatttattcgtttcattatggtaggcgtctttgcaaccgctctgcactatggtttatattttatattccagcgattcatcaatgtaaatatagcctacagcataggctacatactcagctttattgctaatttttatctgacagccctttttaccttcggaaagaagccatcttggaagaaagcttttggcttcgggggagcccatctgatcaactatatcctacatataagtttactgaatctgttcctttggttaggcttttccaaacccttcgcccccataccggtatttaccatcgctatcccggtaaacttcctgctagtgagatttgttttcaaatacaaagaaagataatttgtttttctcccgatttcttacgaatattgcaaaaagaataattgattatggaaaaatctccagtactcgctatcgtagtaccttgctacaaagaagaagctgtattacacgaaacacataaaagactcagtctcctattggataaactgatagcagaacgacacatctctcagcatagttatatcttatatgtaaatgatggcagtacagatcagacttggcctatcatcaaggatttacaccaaaataccccctatgcctgtgggctgaacctagccggaaatgtgggacaccaaaatgcactcatggccggactgaatgccgtcaaagaacgatgtgatgtcgccatttccatagatgccgacttgcaagatgacgtcaacgccattcccgaaatgctcgaacgctaccgagagggatgtgacattgtttatggtgtacgccgggaacgtaaaaccgacactttcttcaaacgtaccactgccctcactttctacaagttgatgaaaataatgggagtaaagtcggtttataaccatgcggattatcgcttgatgagttgccgtgctatccaacaactttgccgtttccgcgagcgcaatctctatttgcgcgggctggtgcctctcatcggttaccaaaccgcctgtgtttactataatcgcgacaagcgttttgccggagagtcgaaatatccattcaagaagatgttaaactttgccatcgacggaatcacatctttttctgtcaaacctgtgcgcatggttttctggctgggctgtatttttatactgatagccgtatgcgtcaccatctggacgctacgcgcttactacttccacgacactgtacccggatggtcatctctgatgatttccctctggctggtaggtggtacaatattggtatccctgggaattgtaggcgaatatatcggtaaaatctacattgaagtaaagaacaggccaagatataacgaggaagaattgctgttgcgttaatgttgcgcttcttcctcttccctctttctctttttccatagctgccagctattgatcagattctgccatacattatacatacagcataatatagctctgattatcaaagtaaaagcccacctattactaatagtgggtaacaaaatagtaacaaaaaaaacgaagaaatcgctttgcggtgggcttcatgtgcaaaggtaacaaaagctctctaaccataaaagcaaaactggcgaaaagaagaatactgtttttcttttcgccagcatatataatttgctgtcaatagaaattagtttagtccgttttggatatatagacaaaaacacaaactaaacttgtgtttataataactttttcaacttatctatgacatatcttccaatgcagagaactttgaatgatttaggtaacagatatttggatgttttaattagaatgtcccttttttacacctaatatctatctaagaaatcttacttttgtttgataattaaaacagaatggagaaaattcaagtaatacaacctaccaaattgctcgctccttatataaagcaatattggcttttaaggatagatgatgtaaagcaaggctttcaacgttctatcccggcaggttgtgtagcacttgtttttcataaagggaacaaaattatttcttcttttcataagggaacgcagccacattacaaatagggtaaatttcaataatggattgttttgatgaaaaaaactcttcaatatttagacttactgacatagggctgtcatagaagacgctatctttgtatcaaaaagtattcaacttaatattatagaatatgaaaagattatttttatgctcatcatttgctgatgttgctaatctatttgtcgattgtgccaaagaagatttgcaagggaaaattatagcttttataccaactgcaagccttacagaaccaatacgattctatgtaaaaaaggggaaaaaggctttagaagaagcaggaatgattgttgaagaagtcgagattacccaactgcccaaagaggaaatatcttctatattacataaatgcgattatatctacataacaggtggaaatacatttttccttttgcaagagttaaaaagaaaaggtgttgataaaattatatctaaacaagtgaaattgggtaaactgtatattggggaatctgccggagcaataatagcctctcccgatgcagaatatatgagaagtgtgaattttgatccaatagaaaaggctcctgaattgaaagactgtacttctttagatttggtcaatttttatacgattccccattatggaaattttccattcaagaaaaaaggtgaaaagatagttcaactatataatgagaagttgcagcttattcctataagtaataaacaagctgttattattgaagattcaaatattcaaattaaagatgcaaaatgaatagaatagaccgtatttctgctatattgattcagttacaatcgcactcgttagtgaaagcacagcaaatttcagaacgttttaatataagcattcgcactgtatatcgagatataagaacattggaagaggcaggcattcctatcataggaaatcccggtattggttattcacttgcagaaggattcaaattatctcctctaatgtttactcaaaaagaggctttgtcctttttgattgcagagaaattagtacatgaactaactgattcaaatagcaacgaacattataagtctggaatagaaaagattaggtctgtcatgcgttttgcagacaaaaatatgttagaaacaatggaaaagtgcatgtctgtattggatacttataaatcatcgacctataaacctgatattcttttacttattttacaaagtatataccaaaaaagaattattgaaatatcttatttgggaagtaatgcgttaagtgtttcagaacgaaagattgaagctgttggaattttcttttcgagaactaactggtatctaataggcttttatcttcccaaagaaatctatcttacatttcggatagatagaattcaaaaaatgcacattcttaatgaattacaatcacgggagcatcctcctttggaaaaattcatacgcgagttttacgataaagaaaaattacatgaaatcgttataagaatagaaaagaataaaacctccataatgaatgatgataaatattattacggattaacatctgagaaagagataggggatatgtttgaacttcattttctaacattttcaatcagtaagtttgcacattggtatctgtcttttgcagatagtgcaactataataagaccagattctttaaaatatgaagttaaaaatattatcaataacatttctatttgattgctgccaaatagtatttttaatcgactcaatgaaaaaaatattcgaccaaagatttttccgcttattgtcggaatgctcacaacgtaaagtgtctgcatctgaatttgcagaagctatcgaagaattggcgacccatgtagccaattttagtatcaatgagcaggattacaacgttttactacgttatttttcctttggtttgcaccgtcttaaatcgtatcgtgtacggtttgagcaagaaaaaaatgccccatctgcatctaattgatgaagcgataggacttttgaacactgaaatacgccttatcgagtggcgcatcaaatacccggaacagctacagcaacgtatcaacaaacagcccctttcccctctctatctcgcagacaagacaacccttatcaacatcatggaaatggtaagcggtctgttcctctccaaaaacatcgtgtatcagaacggcaagcccgcctacttggtggacttggcgaaagcctttgaatggctgttcaacatcaagataggcgactgttaccaaaaacatgaggacgtgataaaacgaaagccgggcaaactgaccgggtttcttaatggattggtagaacttatcaaaaaggaacatgacaagaaaggatatagataatcagtgacttatgatttatttataggggattccattagttcccccgtaatttctttgcgcctattttctgaactttgcttcatcaattgattgacagacaagaatgtataatcagaaaaatgaagcaatcatgtatatagacaatgacgatttcagcgtatggatgcagaagctgtacgccaagctggaagaactctgcaaggatgtacgggtactacgcaatgcggacaaggtactacccgaagatgacaacctattggataatcaagacttgtgtttattattcaaagtaagtatcaaaactctgcaacgctaccgggctatcggtgcgctgccttacttcactatcagcggaaaagtgtattacaaggcttccgatgtccgggagtttattaaagaacggttcagcgtcaccacgctacgccagttcgagaaagaacactgtacgaagaaaaagaagtgaatctgaaaagccggaacggtgaatgtacttcatctgttccgactttccctgcttatggcttacccaacttatcggcttctttctttagctgttcggcttgctcattcaacagccttgcacgttccagtgcttctgcctgcttttggatgcgatattcaaaatccatcactgaatcggtcaaacttcggataaaaccgttatcccgttgccacttgaacttgttttccagcatatcaaaagtttccccgtctgcctgtccttgcatcagcaaatagcggtatttcatatcgttgtcctgcaactgctgcatacgttcagccaaacggacattcaagaatatggaaacggaacagacgaccagcactgccgaaaaaacaaacaatcccggacgaatccaagaagtgaccttgttgtaaatccgttgatagaacggtaagggcgtagcttcctctttatccgtcttgcaagagcccaaagtatcaatcattaccttgaaacaacggtaagtttccaatgttattttcttggtgtcctctatgttcttctgctgaccttgcatcctgctccttatgtcgtcaagttggctttgaataacccgcaacttttcttcgggaacagccgaattactgtgcagttccgacaacgcttgttcgattgctcccagccgttcgagagtttcctcccgactggctggcgttgcctgtgcttcctgcttctctttcagttccgtaaccatagagagaagcccctctaaaatcaaattatcttccatgtctttacagtttaagttgttttttctttttcttcttctttctcaaattaaaattaggttcttcatccactgggggagaagaagcggaaaacagaccgagcgaaccagttatcaacggactgtcagccttgcccggtgcaagtgcttgctcccgaacgggcgcgaaagttgtttgccgttggcttccggcaacattcattcctgcatacccgaaacatttgtccagtttggaaaaactgaaactccggtctatctccgaacccttgaacgtgtattcacctttggaaaaggatatgccctgtatctcgtcggtctgtccctttcgtttgaaccggacggtaatacccttttctgctaaccgctcctgtaactgctgccagttacgggatttgccgatttcgttcttcacagccgtgtaaatctcgtatttcgacttgtccggctctttcagtcggtgctgctttacctgttcttttccaccagcgaaataaagcccgtgtttggctttcagcttcttgcatacctgttcgttacggtacatatcgttcctgtccgaaatggtcttgccgttattgtctatgcggttgaacacgatatgcacgtgcggatgttcccggtcttgatgacgcacgatgatatactgcgtatcggtgattttcatttcacgcatatactcctgcgcaagttgtaccatcttcccgtctgtcaatttgggcgcatccactgtcgaataacttaacgcaatatgtccgacaggcttcttcaaatcgggattcatcccggtctgcatacagaagctgcggattatatcaccccggctttcagtcagaaccccgtccgcatgaagcaaaaccgcctgctccttgccaagcacatagttcacacagcccttaaaaccgcttcccttttttatttttccaatcatccgacaaatggtttatgattccaataatcctgtttttgagcttcaccagttccaccgccaccagtgcgaaacctccggcattcgcccggtgcgccaactggttgatgttgttggcttcccctgccagtttgcggatggtgtccgcatcctgcctgttcagccggggtatgacctctgccgaaacaaccgcctgccttacatactcactgacacgcaacccggcttccccggctcgcttcctgatggcgtaatactgcaactcggtcagtttcgtactgacaacccgttgctgcttctctatccgtttctttgccggacgtccccccggcttgtcctttatactcgtcatggttttttacgtttgaatggtgtcttaaaaattgcgaccaacgggagaaattttctttgcggtgagcaaagcaaggtagtttcggtttaccgaaacataaccttgctctccaaataaaccgccagccgttgatagtcctgccggattaaatgcccctgcctctcttttgtcttgaggcggcacgttgtccggtttcctgcttcgtttcctgcacttggctggcttcgtttttctgttcctgcttcctgccgcacagataatcgttcaagtccgaatatcccctataattgtgcgagaagtcacgcacacggtaggagtattccaattcgatagcccgtgtcgcttcatatccagccttgtcattgtcaagcatacagtggatgcgttcatacgggtacagcacgtcaatggctttcggcacgttgacagtcgaattaagaatgacatagtcctgtctgtcaaggtcgggcatggtcgggcagttcttcatccggagcgtgaggaaagaaagatagtccataaacccctcgaataccaaacacttctctctcggctctccctgctgccgtatatgggtgatgtctttcggggcaatgcagcctttgaaaaaggaattgcgaacctcgtaacctcctgccatgttcgggaaaccgatagcaaagaacggtctgccgttattggtaaaatggagttccttacattctctttttgccagttcgacattgataccccgtccctgcaaataacggagcaatgccggatggataaggtcacggacttccaaatgctggaagctcggttctgtcctacgctggggaaaagaaaaactgaccggacggacgtgcggtgtctgttccgctatccggtttaaaaggtatggcaagctgtctgaacaatagagttcctttgccagtgcgatgatgttgccgcccttgcctgcgccaaagtcataccaaaggttgcggtcagtgttcaccttgaaagacggttcgtgttcctcccttaacggtgatttgtaccataaaccgttaccctgctgcttgacaggagagtaacctaaactgtgcagatagtctgcgatgggtatttgtttcacatcttcgatgttcataacattttctttttggggattaaaaaatagttgaaaagtgcaccagtcctgtttagtccgttatatatacacccgtaccatactaaacctgcctgttccgatactgggaaatagtaagtccgttcctcttgtatatacacccggactaaaccaaactgacttttaataatggaaatcgggattatagcggtagcccttgccctctttcacaatcatgcgcttgttcacaagaaacttgttaagcgacacaagaacattgcgtccacgctcgtaaccgatactcgcataaccctgtttcaatgccgctatgacattggaatagccttgtaccacctgcttgccgaaaccgttctccaacgcttcccggtgttgctgttcagtcagttccgtaagcgaaaagttcctgtcctgcttaggttgttggaatacataatcatccacgatttcgggtaaagcgttgtcattgatacggaatgcaaacgggtcaaattcccggtcacgtatgtgcatcgcctttacctcgcttatgttgccgtcctgctggcttttcgtgatttgcaggacggtttcagccttgttgttcagttccgtaccgatatgcccccttgtgttgtcatcccccttattcaaatgcagaacagtgtggatatgcaggttatatccgcttgaccagcgcatcaagaggttgattaggtcggttgattcgctggggctgttgatgtcatacatcaagtcacggattccgtcaatgatgagcaaccccacatcgggcatattttcaagcatatagccgataatctgtttccgcttgtcgggggtctgctcccttagcacgatgaaaacaaaatcgtccctgtccttgtcggtaggcagtccggcaagtcgcaaaatacgctccatgaccttatggcaatggtatttgctctgctcggtatctacatagaggattttccgcttgttcggtggcagatatgccgaatacttcagtacctcgtcattcttcaacgccgccgcaacgatggcggaaatgttgaatgtctttttgctcttggcttttcctgtggatgcgctgaaattacccagcgtgccaatggtagagccgttcacccagagtatttcgggcggcacttcgtaagtgtccgtcacctttagatggatggttttccaaagggctgcaaaatcctctttctgcatggtgacatcctgcccggcttctgtcgcttttctattttccatagccgctatttctttaagggacggttaaggatatatttctgcgcttcctgctctatctgcgcctgcgtcttcaccgggttctgacgcaaccacgcttctaattccgctttctcaaaataaagcattttgccctgcggcttgtaatggggtatcaagttacccgaagtcagcttgtacaggtaactttttgaaaggttcaagaacttgctcgcttcatcaaaactaagcacattctttgaaaggaacactaaattttcgagttctgcaactcgcttctcaatacttgtttccatataacaaaagtatttgcgttagacaatatggagtgcatgccctccagtttcttgtaatcgattacgggggcaaaagtattgaggaatagcttgatagtggattaagctatgtttgaggtattaacctattcttaaagttttttcagttgtttgatataattgctgatggttacataatctttttcatgttccaccccttttacataattggcggctgtggctaaatcaccttgattcagatatttatctttctttatattcttcgtaacaaacaacttattctttgctataacagattgccagttaggtgttatcaaaccacgattgcttaattccgaaaaaagaaaagctacctgcctgttgttattagacctaaatataacttttggcttacaggaaagtattgctttcaaatcttcaaaagtcataggagcattgaaaatttccacttcattgatacaatccaccaacaatgctatttgtctgtcgtttaaaatagacttaaacggaatttctgtttcagcaatatgggagataattttaggctcttggcatttatcttgaattggttgcggctctttctgttgtggctgcatttccgcttgcaccttactttctttcttttttcgcaagtacgcagaatatttttccaatacaacagttttaactattacggaaaaataaggcagttcttcatcataaaccgtattatcttgctcataccgggaataatcaaatgaaagaggattaaacgacatgtattttcttttctcatcggatttcaaggattcataaaaaccgctttcccaaaagaaatcagatacagaataaaaatattgaatatcattcaacacagaataacgaatatataactgcaccaactcatcagcggtacgaacatattcttgctgttccagtttatctgcctgttcttcgtcgaaatataaggacttagaggcaatattatctatcataacttggctggcatgattgatacagcgattgaatataccttgtatatggtcgaattttattttcagttcttcttctgtcataataatctatgtttcagttagtagaaacaaagatatatttttccggctaaacaaagacaaaaaaagaaagaaagtacggtaactgtgatataaccatactttctttttaaatcagtccgtcaaattcggtatcaaacttatagcttcttcttttttcttatcgacaatcttcgcataaatttgagttgtggcaatatttttatgtcctaacaatttgctaactgtgtacaagtcagcccccaatgtaagcatcatggtagcatgggtatgccgggcaacatgaaacgagatatgcttaataatccctgcgtctttcgcccatttttgaagtattttatttatagttccctcatgcgtcaaaggaaaaatcaaatcatcgccttttgcttcattttgttgcggcaaccactttaacgcttcatcggatataggcagataaagcggttcttttgttttctgcatctttatttcaattcttattctttcaccgcttttctgcaaatcgttccacttcaattttcttatatcgcttacacgcagcccacacaaacaactgaaaagaaaggcttgtttcattatcccatacttgcactctgtcccgataagccgcttcaattcctctattgtcaaatactccctgcggctgacttccgcttttaccttactggcaaaatcaaactctttcgttggattgaccgtaataatcccctctttataggctctatttatagcggtacgcagcaccccatagtaagcaataacggaattattacttaatacacccccagcctttaacaaaccaaacttgcttgctttcttcgcttgtttcaagaaatccacaaagctattcaagaagtccttatctatatcacgaaaagcgatataatcccctctgaacaattttagttcacgaatggtattaccaacggtcttttcatagttcaagctgccacgttctttagattggcttctcatgttcattaaataatcaatcacattcgcttttgacttgttggtgttctgaaagccgtgtgcatcattttgcaactctactatccgcttgctttgaatagcttttgcaagagccaacgtagcttcgttctttgccttatcctctcttgtcttttcgggtataaggtataatttcaaaaattcatattgccgtttaccgccaacataattttcttttctaataacatcacctgtatagtagtccaaataaatagactggttgccattggcaagctgcttgaatctaatccttacaggttctttcaatttaacttcttgttttttcttcgccataattatgttcttattttgttaccgatacaaatatagcgatttgttttgttacttcaatgaatacaggtaacaaaatagtaacaaaataaaggcatttattagactaaacaagaaaataaggaaaataaaggaaattacattcaacaaatataaaatactaaatatcaatatcttatgttcaatattttatctcattttttctctttttccacaactgacagctgttgatgatgttctgccacaagacataagatcccggtcccacggaggaaagtggattcagataagtatatgccatccagatagcaagaaccgtatttttctgtcccagtgcctgcccgccactgatacggtcattataacgtccacctatattcttacccagaaagaattgcaggcaacaagccactaatccggcaaaggctatcagtatttccactgaaaccggtgcatcactgattgccagggaacgaacagtttgcccggatacaatagcaagcgctacgccccacaaataaaaagcaagatcatggaaacccaataaaaaatggtgcacacggggcataaacactctcagaaaccacgccaggaagaaagggaacaacaacaacgggaacactttactcaggattttcaggaaagcagcaaagaaagtcatgtcagcatgaggctccactaacggaaaaaccaaaggaaccgctactgccgccagcaaattagacaataaggtataagtagtcaacgtagatgcactgcctcccaacttgccagtgatgacagccgctgcagtagcagttggacaaatcacacaaaccatcgccccctcaaatacttcccggtatatttcatccatcggacagcataccagcaaagcggcaattgccagacatgaaattgtctgaaacagcagcaaccagccatgccatgctttaggtttcagttcattcagtttttctactttacaaaaagtaagcaacagttgggcaaagatcagcagtggagtaatatacgcaatcaaatcattaatatatggtttggtaggcgccaagaaagggacatttgcgagaataaagtatcccaaagtacctgaaagcatcgccagtggcaatgtccagttcttaagaaaacgaactaacataccttttttctatttaatttgcgggtgcaaagttagtctgttttaaagaaatctctcacaaatcctggggaaaagtaacaaaacttcatgtaaaacgtgagttttctataaatttccactacatttgcaacgatttttgggtatgaaactatataaacgacacatattatatatctgtatttgcttcgggctgttcatctctcctttttgcactaccagcatcgaagcaaaagacttcgttgtcgttattgacgccggacatggtggtcatgaccctggtgctttaggccgaatctccaaagaaaagactatcaacctgaatgttgccctcaaattaggcaaacagataaaaaggaattgccctgatgtaaaagtggtatatacccgtgaaagagatgtatttatcccacttgacagacgtgcggaaatagccaataatgctaaagctgatttattcatttccattcataccaattccgtagcgggcggtaaaactgtcaaaggagcctctacatggacgctcggtttagccaagtcggatgccaacttagaagtcgctaaacgggagaactccgtaattttatacgaaagtgattacaagacgcggtacgcaggattcaatccaaactcagccgaatcttatatcatctttgaattcatgcaagataaatacatgtctcagagcgtacaccttgcctcattggtacagaaagaattccgccagacctgtaaacgtgcagaccgtggtgtacaccaggcggggtttcttgtattgaaagcaagtgccatgcccagcatcctggtagaactcggtttcatatccaatccggaagaagaacgttatctcaattcggaagcgggaaccaccacacttgccaacggaatattccgtgctttcctgtcttataaacgtgaacatgaaatacggatgacaggaagcagccgcaccctactaccggaggatacggatgccggtagggtagaagaagaaacacctcccccccccatttccaataacaccgaaaccaaacaaaatacagaaaaagtagctgacaagcaaaccgataatgctgctccagtgtttaaaatacagatacttacttcttcccgtccgcttgctgccaatgacaaacgactaaaagggctgaaaggtgtagagtattatcaggaaggcggactttgtaaatacacatacggtgcatcgaccgattataataaggtattacgaactaaacgggagatagcaccaaaattcaaagacgcatttatcattgctttcaaaaacggaaagaagacaagcgtcagcgctgctatcgaagaatttaaaaagaaaagaaataaataataagactataacatcatgatgaagtatcttactaaagaagttagaataggaattgcgggcattattgctctctgcatattggtatatggtattaactacctgaaaggcattcatatgtttaagcctaccaactatttctacgtcaagttccataacattaatggattgaccaaatcgagtccggtctttgccgatggctttcgtgtaggtattgtacgcgacctttattatgactacaatgaaccgggaaaagtggtagcggaaatagatgtagacccggaactgcgtattcctaaaggcagtaccgccgaattagcctccgaactgatgggtggtgtaaaaatgaacttactacttgccaataatccacgcgagaagtatctgacaggtgataccctacaaggcaatgtcaacaatggtgtaatggaccaggtagccaccatcatgcctcaggtagaaaagatgcttcccaagctagactctatccttgcttcactgaatacaatccttggagacccggcaattcccggtacactgcacagcgtgcaaaacacaatggcaagcatggaagtcaccagcagacagttacagaccattatgagtaaagatattccccagcttactaaaaagctgaacaccataggagataatttcgtcactgtcagtgataatctgaaagaaatagattacgctgccgcatttgccagaatagattcgactttagcaaatgcaaaaatgattacagaccaattaggcaggaaagacaatacaatcggcttgttgttaaacgatccatcgctttacaataatttgaatgccacaacagccaatgctgccagccttcttgaagacctaaaatcacatccgaaaaggtatgttcatttctccctgttcggcaaaaaagataagtaggaaaaatctctttaaatagaataagtctaaataataggagcaaacagaattggaagaaaaagcctcagtaagtccatgtagaaactaaagtattcccatctgtcagattatttgaaaagttaaaaaacttatttccttcttatatattgccctagaaaacagatacttataaaaatacaatagcctccctgtggggctatttacatgaaacaagataagtagttgaaagtaaagagattattgtttttagataaaaagcaagaaaaaacacatttgtttttctcaaataagattgcgaattttgcatgcgtagaagttttgcttaattaataaatgtatttaaagccgtt

SEQ ID NO: 41 - DNA, 44926 bp, Bacteroides cellulosilyticus
  source 1..44926: mol_type = genomic DNA
atcgtttcttttatgatgcagccgttttcctgtattcaagtatagagagaaacgacacaaggaactttagggaaaagaagatttttcgtgttgctctttctggaagtggtgtatattaatcacatattatatgtttataggtttatatattgtatattcatatattatttatatatattattttgtttttgttctttttccctatagttttatggtatcaattttttgtgtccggcttccagcagctttttgtatttggtatcaaaaaggagttcttcagaacatattgagcatgataattcggtatcatttcatcatgctatatacgcccatcagtgccggaaccggaggaagaatattgtaagatatttgtgatgccttattgtttatagttctatttattacatatcatctattgtgaagcattttgtttcaatttcatagttatagaagagttttgtacgaagaaattctactttttgttgtaataattttggcttaaaattttttcgtaggcgtttaacttcaccgattaaaacttttttgttacttgcgtatattgccacaatatctacttcgttttgagccatgtccttgcctttggatgtttcccaccatgagccgatgtttctgtaaaacatttgttctgataattgctgccgaaagtatctttcaagtaccatgccagaataagttgaataatctgatttgattagctctgcaagtccatttaaattgccggattctataaaatcttgatttcgatttatatatcgaaaccaaaaacgtaaaaagttatctgctatttcataacgtacattttgagttccttcttttgataaaatcgggcgttttcgcctaattacagcataatcatcttctaggcgtttcatctgtcctccaatacttccgcttgtaaatgtggcgagaatatcagccattgtgttacgcccagaagcgatagatgcaaggatagaataatagttgccatatttcttcccgaactcctgaattaatagataatctccttcatcaagaaaaaaagaccctggacgaatcataaactctaccatgtttggcatggtatatgctccagcttctaataaaagctccacgtatttaggtactccccctgtgaatgtatatagagccaataggtcttcattggtgtagttggggttgaaatcagctatgatattttttaggacggaagtagtgaatggcataatctttaagttacggtcagctcgtccgtataatggttcacgtgcatctttaaaaatgcggtgcataagtgtatatacagaaccgcttactattaaattgacgtgtgtgctatccttgtatctatcccaaacgtcttgcatttcgctgaaaacagattcattaatgtagaaaaattcttgaaactcatctatgataagattgaatttgcggtatttccctaattccattaatgaggtaaaaatattgataaactttcctgaaccgtcagaaaagtgcatattaagcgattggctgattacttgtgtaaatttactgcaaagttccccttcgttttttcgtgctacaaaaagataaacagttggttgttcctcacaacttttcaatatgagttttgtttttccaactcttcttcttcctgttacaacagtaaaacgtgaatggtcattaaatgattgttcctgtacttcgcaaagtacctttaattcttcttccctattataaaatttcatatgaatatgtttttaaattcatcggagggtaatttatcggtggatgaatttcagtttctgtgcaaagataatattttaatcaataacttctattggtcttatcaaattttagagaacttaatttttttatgataatgtcctataaatgtttggtatcaaattccttcccggtttttctccagtactggcagaaaaggtatcaattagataatgtctttttgctgatggacgatagttcctgttcctgaatggtgtcggtatcgtttcttttatgttgcagccgtttttttgtattcaagagtggagagaaacgccacaaagaactttagggaaaagaagattcttcgtgttgctctttctggaagtgaagcatattttatatattatatattcatatattatttatatatatggtatcttgtctttgttctttttccctatagttttatggtatcaattttttgtgtccggcttccagcagctttttgtatttggtatcaaaaaggagttcttcagggtgtatcaggaacgataattcggtatcatttcatcatgctatatacgcccatcagtgccggaaccagaaaaaggatggtatcaatttcttttcagattataaaacaaagaccgagagttttacctcccggtctttattaatagcaatctctctttttaatattcatcatttgtgataaatatttctactctcctatttttagcacgcccagcttcacttgtattgtctgcaatgggttcgctatatccttttccatcttctgttatgttgtttgtttctataccagcggttctaaggtaattccctactgctgctgctctatttttagaaagtatgatattgtattgtttttctcctatattgtctgtatgcccaattattttaatcttagtattgggtatttcagtaatgatattacatagattagaaagcattttttgagcttcttcatttaattcatatgaatcaaatttgaataagatttcactttgagctgttgctttaaactgttcttttccatttttatccttatagctggagattgataagccatcaatagcttttagtttatttcttctagcttctatcttttcttggatagctttatctctttcttccttaactaattttgcacttccaccaactattgaagcggttgaatagttgctattattttctatcatgtctttttctttgtcgcttagttcagcgttactgaaagttatcatatgcgttgaagtacatgcggtaaaaaatgtaataacgaaggctgctagtataattattttctttttcatgattatcttattgctataataggtctaattttaaatgaatttcttttgcttgtactggttgctctcccttttgttaatgaagaaattagtgcaaacactttaggagtatcttttcctgctccatcttctgtagaactccagtaccaaccatcaaagtgcgttcctccaatgattgagaaagaagaatataccttttcaagattattagagattgctttgttttgtgcgatagagccaataaaccaacctgtaacaccttttggcgcatattctatagctttttgagttgctggataagctaaactatcctttatagcaaagttcattattgcggcagtattagctgctccatcaaagctgttttcatcttccgaaacattagctatatcctcgtctgtgtctattaaaggattttcttctaaatcttctaatgaaacggcataagcggtttcttttatatttggattattcccatcattgcaccaaaatacaactccaatggcttctttttcactgggtgaaaaaagcgagggatgcactatacttccatcactacataagatactacccggctgtaatgatgtgtctataatatcttcgtgttttgtacatgatgatattacccctataatggataatagaattatatatatttttttcatacttatttatttattggaaatttgacacctactaataatccatttcggaaatggtcacgtgtccaaaatacaaaatcatttttttgcattacaaagacttgcattccattcctaaatgaatagctatattctaaacctatatcaatggaagcctgaaacccttttctgttagctcctaaatctgctccaaaccgccatcttaaaatactgtttttgcctcgtgagattgtaggtttatatgctgcacctatgccgaatgttttataactccagaagctatcagagcataccttattacataccgggcatttatcatatgctgtagctaaatcaatatatagttcataagcattgtgatatttaccttcaaactccagccctacaactgcattgacggtatttttccattgccaacctcctgaaatattaaaaaacttatcaccatcaccagccattgactttagggaaataaatgaaatcataataagaaatataattttcttcattgtgttattatttaatattgttagtttcatttttttctgtggattcatacatgattttcgaaaaatcaagacgccctttgtttattagaaattttatatcatataaggattcttcatcattctctttttttatattcgattccaagaacaaaaaaccatttttctgtaattgttccacttgccatattacaaccataaaatagtgaagtaggataaattgggatgtattaggggaatattttccttctgtgaacaaatagaagaattctttagtatatagccttcctaaatatgtggttaattcatttttgattccagtgaattccgaaccaacatttaaggtatgacactcattcaatcctcttataaatatttcagtttccctatcacgcttaagcatttctgacaaaatacttatatcaggattacatacggttgctatgatgtaagcaagattacaatattctttaggatagtgtttgcagtaatagtatatggttgctgcaaaaatattttccgctgtcattttgaagtataaatattcatcccatttataagtttctctatactgcattccactcttctcaatagcaagaaatatatctttggatatttctatagctttgggaatactatttattttctctttatcaatggggttgtcaaaatagaaatcctcgttccagttaatggaacgtaatttataaccaaaacttggggttataattggagttacttcttttttctcattgagaatattcatatgttttatttttaattattaaaaccagaatttatatatagcaattaaaattaaaaaaccgagaaggagtatctgtgttaataaaatacctcgctttaaaatgtaatattcttctcgattcttggattcttcttttaatgtttttattagttcttctatagacatctcaagttggctgcctttttccatagcattttctatgcgcttcgtataggcttcgacacgtttcaattcttgatataccagttctaccgcaagctgcgggtttactttcggcgtggtgtctttccttttccgtgggctgtactgtccctgcttaacgggggaagcggctacctctgggcgtgagtttgtttccatattaattcctgtttttatttattcggtaaaagcatctgcatgaagaatgtctgcataatcaattcttaatgttatagtacgtcctgaaatctgtttttcagatatttctatggtaagaactttttcgtctgggaaagtaaatttttcaaagacaaaaatatttcgatagttcttcttgaaaacaagattcttattaacttgcatcaatggaagtatttctatagattgaaaattagtagcctttgtttgttttttatcttctattttgaagcgtatttggtctatatcatatcgtatttttgtcttattaatcatagaaatatcaataaagaaatacttatctaatgtgtagatattgtttagtacaattttcattaggttacttttactggaaacatcatagaatttattttttgaaataaacattctatgtgcgtaatcatacatttgtgctttggttaaattcacttctggattcatatagctacgtaaatcagcataagggatattaaagcgagtgtatgcttttgctaaatcgctactatatactagcatatattgtacgaaaaatctttctgtaacaatggtgataactccactagctccttcttttgtgggctttattctaagagagttaccagtaggaatatcgccaacaatatcattgactgatatatcaacatattttatatcttccatagctataaaatgcgttgaaacatctttgttgacgtatataacctttagttcttctgggttttcacctgcaagctcgatgttttctccaataggggtgttctgtgcatttcctgtaataacagaaaccattgtgcataatgcaataaaaatctttctcatattattgttctttatctttgttgtttactaaaaaaacttgtgtgttatattttaatttggctttgttttttttgatgtttttggaaagagcttgggttgtactacggtaagcatcttgtaaagcacctaaagcgaattgttctactccttctgattggctgttcatttgtatagtttggcttcctatttgcgctccaacatctttactcaaatctctaaaagctgatgaaggaacaaagaaaccttcttgtccgtcattatcatatacggataaatctactttcatttgtttgccatcaaccattatagaggaaatattaatgtgtactctttgggctttaaagccagatacattcccatataggtaagtgcctttagttaaaagagcgtcattaatcattatatcatctagaagccgtatgcgtactcggctaccatctgttacttttaaagtttcatctaatatagctgtgattagcgaagttttttgttctttccctacagtattaaaatatacttctgcgggatttttcgcttttacaacttctatagccttttcttttggcttttcatcctgttttttttgaggtgttctaggacgtggattttgcaatgaatctatataagccatttgcattttaaaaagctccatttcttcttgcatcttggatttttcaggagcttttctagtttctatttggcttgattcatctatagtaggaaatccttttatttgttgttccaattccttttctcggattctagaagcttgatttaaactgtcaatttgccttatttcatcattggagtaaagagaaccagaactttcaatttcgctaacctcttcttctttatctatggtttgtattgatgaataatcagaagatttattgaaagctcctttgagtgattcaaatttactttttatctctcttttttctaaattagcatcaggaatatcaagatttaattcttccgtttctactaatgtagtttcttctgctggggcagagtttatcatatccttaactagccatcctatccctaaaataaaaggtaggatgagtatcggaatgatgtacttaggctttttaatatcaatctgtttcatacgctatttatttaatttattgtataaatcttttattcgtacagtgtcttctggagttaatttcccattttttcttagctcattaatttcattttgcattttaatcacttctaacaagtcgtgaactcctacttgttttttttgtaggttactatcaatgttaatttgtactttgcttttttcttcgttgaaaacttgcattggctttctttctggacgcattactaatgatagaattgtgacgaaagaaaggaatgaaatcgtaattccaaacatggctttacgatgtatgtcagcccacgctaataagcgttcacaagcgttattaactccgaacttttgaaatattttagtaagaagaataactgtagcttgctcggctttagtcttgatactttcttttctatcattctttttatgtttaaacagtttcattagaaattcttttttactttataatctaggtctttgttgagtatcgttttccaatctgtgataataagtccatgaggattattttcagtgcgtggaatttgtcttaatttccctgtagttacaagttgcctttttagaatagaagtttctcgctctatacgttggatgccatagtactcaaaagataggttgttcatgtccatcttgatactatctgtcataattgttactgttgcagaactcgctaatatggtgttgaaatatcctttttcttttaaattattatattgttttaatccgctatcatcaattagatacatggctttttccatgttgtattttataaattcatcgtctggtggtaatgtgaaaaataaagtgtggaatagatttatgtggcttttacattcgacttccaagttgacttctgtaccagtttgtttcactagtacagggacatcattatccaaaacatatattttttttctttcagctttcactaaagagaaacaaaaggctagtaccatacctgaaataactatactagttgcaaaacagccaatggataaaattccggctaatttgattttattttctaagtttttaataatcatgattatgtgaatttaaaatttaatgaatctttttacatagctgcactggctccacctgtagccggagctgctacagctttggttgcgatggctgctcctccaaccatgcctcctactgcttgccctactccagttgtacttacaatccatgtagaaacaaaaggtattgtaagcatggcaaatgctccaagtaatgctgtaagaaggaagctattgacacctccagaggtcattccgacatacatgacaaatgcagcttcatttctaagcgcatattctaaaatttcaatttctctttctatcccatattgcattactactaaagaaattgataatactatatatgcaatacatgaatataaactaacactgacaaaacgagctatccattgtatataagcatcccgaaatgcaggtaaaacagagaatgcaaaagctagtggaccaagaataactaatattcctgtgaatatgatttgtaggaaaaagacaaaataggtacatacttgccaaaaagtaacgacaataaattcaatgatattaaacattatcattttaaccttagcgactacatatacatataatccagctatcttgtctccaatagctgaaaagtctatactaaaatcataccatttcttatccttaacttcattttcggctctttcaacttctaatgaagtatgtaataactctactgctacgctatcaatgagtgcatatctattacgagaaagtaattctacttcttctatctggttcgtaaacatagccttgctttgtgctgttaataattctccgggataactgattagattaataaagggaatccagaacataagaaccaatcccagtgcgaatggacgcaataacgggataatctctaattttttatctccactcatcattttgaagctttctactccaaaatataataacataaagattgctgccaatgcttgtgcatccgcaataaattctccgaatagaacagttgttttatctcttagtccatcaaataattcaaataagaatttatctattaactcattcatggctcattattgttttatttatattattcaatcttgttattaatgaaagaacttctattagttctttatcaaaatctaaataggcttctctctttttagagttactcatatgtgaatcatggattatatctatgttcttttttattctagtaacttcatcagttataacttcaatgtgttctttattaccgccattagaagaatattcgacaagttttttatttatatcattaagaatatcatttctgcgatttttagttaaagtatattgataatcaatttctttatctccaaatttgaagagctcctgtctatatatggtatcgacattatacccttctttttctgtttctgatttattgtactctacggctgccatcatgggaatttcttgtaactggaaattacgtctatcttccttcccgtatttgtcgtgtaaccctaagcccggcaaaggaattttaatacccaaaacctttttataccatatccagtaatgataccattctggttgtagtcgtactctatccataaattccatattattaagtacgctccattttcctttatcctttacaggcatttgggaatagacattagaagtaccaataatcaacattagggaaaaaaataaaagcactcttttcatattatcttttaggttttactttataattctgtaataaatcatcaactaattttgaacgattatctttgtatttaaacactcccggagctaatgtttgtaatactccatttctttttgctgttttcatctgtcggcatacagcgtatgctatacctctcatatttcttagttcattaataacatacttaagcaagtctattctttgcttattgtccataaggtttacatctgtcccgacaatagcgacctgataaatgtattgtgtcaaatccgcagtgcgattaactaattctagctctgtttttgctgacaccaataataaagccgggtcacctacagcaagttcaaccatttgtttttgatatttaccaatatctgctgcaatatcagtacagtagataatatcttttcctgtttttatgatggcttctacagattttaggctattataaaatttgctttggaaaaattcaatctgaaccattttttcactgatttgcttttgtataaggcttatttgagcttcattctctttcactttagagaaagaagtatgttgcaccttatgattagctataagtgtttccatacaggttatatccaagactgccttttgtgaatatgcaacttgggttaaagtagatgttaccactaaaataaataggattttcttcatgatattatctttaacggtttgtaatccttttgtatttatctaggatatacttatataatggttgttcccctatggtgttaagtatatcttttaggcttccttcatcggagtgataccctagtaccttattgacttgtaaaacccaatccgtattttttaatttggaagattttaggtctattataaaattatccaatcctgtttggaaactatcataaatgatatgataatatccaacagcatctttttcaattcgttctgtagtaaatgtgaaatattcgtgcagagaaacctctactccaaatacatttccatagtttcctctttttataaatacttcattaaaccgattacggttttctttattgggaagttgatttatggtaaatatttgcttttgatttacttccgttagggataaaagatttgctatttcttgatatttgtctataaatttactttggtctaataggcatataatatcggagttgctgattatagagtttttgactacaggattactaattatgtcttccagttcttgagtaacaaccattgccataccccaaaatttacgaaccgttttatacaaatagagtatatagccagccatcatagggctagctatggctttccatgcttcttcaattattaatgcctttctgttcttttttaatctcattttttgaataaaaacgtccataataattagggttactattggaaataattcagggtcatctttaattgcatcaatttcaaaaactataaaaggttcttcaaaaagggaagtatcaaaatcctcattaagagttttttctaactgtcctcctttatagaatttttttaatagaaacttatagttagtaatatcaaaatcaattttgttctctttacaaatgataggtataatgcgtagggaaaattcgtagaatgagttaaaagataagctttcaacttttatttctttcaatatatcttctttcttctggattcgtctttctattatagaaagtaatctagtttcaggattatcaagctcttggcgtgtaaagcctttttcgatgagaatgttttgtatcgctttttctgcgttggttttttctccgccttctcctttttctactagttgctgtaatttctctattttttcggaaagtatcttgcgttcttctttttccctttcgttttcaaattcttcttcattgacttgaaattcaagtagtaaattttcacgtatggcttctttttcagcatctgaataacctttaaaaggatgaaagtagaaagaataatatttttctatggtaatatccataatttcttcttcttgctttttgacctcaccatttgcacctttccatatcaggaaaattaatgatttaagaaagtttttcttttctacattatactcttcttcagtaattcggaaaggattcatagatataggcttgctttcagaataagtaatgtatttgccatgatagtattcgcacattcctgaataactatgccctgtatctaccaatacaatatcagtgttatctaaaacccattgtcttactttggagttgacatagaaagacttaccagaaccacttggacctaaaacaaagaagttggagttatttgtatattttttctcaccttctttcccggacatatctattccaacaggcaatccttgtctgtcagtaaaataagtaagaaaagggctgttttctgttacttgtaatttttccttgaataaaagacaaattgcagcatcggaagttgttagaaatttgtcataactgtttaggttgattgcgtttcctggcagtgcacattcgaataattctaattggttgaagcattgtttattaataataatgccacaatcaaaaagagatgtttcaacatagttgatagccttactaatatcatcaagaccagcaagaatgatattataatgtgcatatacaagcatttgcccttctctggcaatatccgactgcactcgttctatgtcttctacacataaatcatttgcagggtcaggcattcctttatgttttttctttttgccttctaatttgtttgcttcgtttcgttggtctggaatatttattacttgattatagataattgtgtctatacttggtgtatcatgcaaaaaagagagtaagtcaacaggaaaccttagtccaatattgacctctttatatggttttataacagaagggaaattaacttcgtcaatatctacaagagaaatgcactgtacgtttttttctccaattataagattttcttctctcgctttgatgttttttaggcttactgtttgctgattgaaattgatagatagaaatctttttatatatatttctatttcattttcatttaatagtttagctcttattcctctgttggcgaatagtcctaatacttttgtgatgtttctaataaaagtatcaaaccttcgagggtcaaaagaaaagaatttagacctttctacttctcctgtaataacaagataagtagaaatatcagtatatattcgtcccttaaaatgttcaaaataacgattggataaatagtcgttcttcctattctggggtggtaaaaatgattttttacatagaatatcctgtttttgtattgtatatccagttcctaatactttgaggatattagtaaataagtggtgaaaatcatagtaagcatccatatctgctgaatactgtattataggattttcacatttaatgataacagaatagtcgccccttcggttatagaatataggagtattgtctattgtttcaataccaatataaggagcttcaaattcacttttctttttcataagctttatttttttctatctcttacaaaagtgcgtgatactatatatatgccttttcgtttatctttcctgtgaagcccttttttttgtaattgcgatgttattcctaaccctccaaacataactattacaagagttatacctccccacataaaagaagccagagtagaaacaatagcacataaaagtaaagcactaataatacaagctccaccgatatatatgaacttgcctttaaatcctttgaaaataaggggcttttgcagccccttatacacattgtaacttggatactctttcgacatattagattccgaagaatgcttttacgacaacacctgatacaaccagaaagatacatgaccccatccagcccataacagccttttgtacatcttggtcaccagagttccattttaaataaactcgcactgctccaactaatcctactagacctcctagtatcatcatcatgtttcctagggggtccatgtaggttgcaagttcagaactggctgcatcaattccggcagcaccttgtgcaaaagtgttagttactaccattgtgctaatggctaaagcgaatgctctttgagcaatttttgaaaaaaactttttcatttgaataaaatttggttgtttatttattaaaatttacgtgtgaaaacatacttttccctttagcaagaagttgttccattggaataccttgtgtttcaacatccatttcaatagattcatttacagatacataattttgttcagattcttttttttcatcctctttttcgtatgagcctgtttcaaaatcttcatctacaactttgtgaggtatttcttcttcctctcctattgaaataatttcttcttcttcacctgtattggttttgctttgctttaggaaagcatcatacagaatgtttgcagcatagtaaactacataaatggcaaatacagccatgataaattgtgaataactcatattcttaaatttaaaagtttcattaatcgaccctttttctgtacttttgatttataatagtactagaggtaataacaggggaaaaaaacctagtttaaaatagtttcgcgaatagttgaattaatgaaacttggatttaaataaaatggagataataggctacgctcgtgtttcaacgagggaacagaatttagatttgcagctagatgctttaaaagaagccggatgcaaacttatatttgaggaaaaagtatcaggagtaaaagatagacccgaattagataaagcccttgcgtatttgcgagaaggtgatacttttgttatctggaagctagatagattaggacgttctttgaaagatttagtttatatagttgattgtttgcagaaaagaaaagttgcattcaaaagcatagttgatggtattgatactaatagtgctttaggaaggtgtcaatttgggatttttgcttcattggcagaatatgaacgtgaaataatagtagaacgaactagggctggattacaagctgcaaaagaacgagggaaacttacgggacgacctataggattatcggaagatgcaaagagaaaggctatagcagcaaaacgtttatatgaaaatcgggattattctataggtgaaatatgcaggatattacacattggaagtaaggctactttgtataggtatttacgttatgaaaaagtaagattgatgaatagaagaaataaatagggcgttacctttcaggtcgggcttttcgctgcaagtcctcgctgtgctgtgggcttttcgctacaatccctaacgcatttttcccacccacccttctaaggtatatccaatgctttgctttttccaccgcttctacgaagcacctacaaaaacaaggcattggatattcggttttatagacttcatgttccctaaagggaatattccgtttataaaacctaatctcttacccaaaatatataaaactttagggaaaaaaataatacgttgaaaatcagttgtttataaactatttttaacaaaaataattgtcctattatttgcgacatttatagaaaattcgtatctttgagtattgaaaataaagagataaataaacttttaaagctggtctggctgccagtataaagaacagcaaacaaaattatgaaatctacttttgataaaaatgcagagaagtttgtaaaccttatggttgagaaaattgaaagtttgtctatgaattggcaaaaaccttggttctctaaagtcaattctaagcagaactttttaccgcaaaatttaacagggcgtacttatagtggtggaaacgcttttttactttatttcttgtgtgaaaaatataattatcaaactcctgtttttttgacattcaatcaagcacgaaacgaaggtattaatgttctaaaaggtgctgctgcttttcctgtttattatacattattttgtgcttatcatcgtcagacaaatgaaaaaatttcatatgatgaatataaaaaattatcagaagaagaacaaaaagaataccgtttagcagcttatacaaaatatttccaagtttttaatttagaccaaacaaattttgcggaaaaatatcccaatagatgggatatattaaaggctaaattttcaggagaggaacagccacaagaagagaaagaaatgtatgtaaatccaatacttgatgaaatgaataagaatcaaaattgggtgtgtcctattcaaacggtttctagtgatagtgcgttctattcaatatcaaatgatagtattactttacctttaaagagccaatttagggacggagaaagtttttatggtacagaattacatgaaatgggacatagtacaggtgttaaaaatagactaaatcgaaaaggattttatgaaaatgataaattcaattatggacgtgaagaacttgtagcagaattaatatcggctttgtctggtgtatatttgggtatttctgtaaccgtcagagaagaaaatgcggcttatttaaaatcatggtgcaaagcaataaaagaagaacctaaatttttatttactgtattggcagatgctattaaaggtagtaagttcatagcccagcatctaaatataagactagatgtggaagaagtagaagaagagaaaaatacaaaggttgcttaaagattcctccctcccaaatgggggggagttcttttttcaaacgccaaaaaagaaccaaaaaggcttaatcgcttcactttgttacgctccaatagttttgctatcgataaacccacccacccttcttaaggtatgtttctttatcccttctgcaatccttagtaaagttccactaccttttaggtaactccactttagtaagcattgcagaagcggaaacatgacgcaaattaaaatacattctcactttgagaatacattttaatgcgtcttgttgtctaacccaataagaactatagggaaagaaattgataccgtacttttcggagttccggcactgatgggcaaacatggcatgatgaaatgataccgaattatcattcctggcacaccctgtagaatgaccttttgataccaaatacaaaaagcagctggaagccggacgcaaaaaattgataccataaaacattagggaaaaagaacaggaacaaaatattatattatatatataaataatatatgaatatataatatgtaaacaaataatatataatatgtgattaacacgcttcacttccagagttccagaaagagcaacacgaaaaatcttcttttccctaaagttccttgtgtcgtttctctctatacttgaatacaggaaaacggctgcatcataaaagaaaagacaccgacaccattcaggaactatcgcccatcagcaaaaggattgcatctaattgataccttttctgccagtactggagaaaatccggaaaggaatttgataccgtacttttcccggttctcccggacatggacgaaaaaagaacactgttatgataccaatactttagggaaaaataaaacttcggcagtctataaacctaaaaccatttttaacaaaaataattgtcttattatttgcgacatttatagaaatttactatctttgagtattgaaaataaagagataaacaaacctttaaagctggtctggctgccagtataaagaacagcaaacaaaattatgaaacattgcttcttaaatccatttcgtagccaactgttaggactatttttcagtattaattcattaatcatttttttatgaaaaaagagtttacattacgcttagacgatgcagcctgtgcagagttagaaaatctaaaaaaattatctggtgaaaaaacagatgctaaagctattagatttgctattcagaattatgcaactttgaatgataggtatattgaaacacaacggcaaataagaacgtggaaagataaatatgcagcgttaaataaagctgttgatgattacttgtcttcttttgaagcattgaagaaaactacagattgatagtcaattattagaaatgtgaaaggattaatttatgattggagtagagaagaaaattttcagattatctagttctgtgttaaatcgtacttttaagcaggaaaagagtattttttgtatacttgaatttaacggttcagaaatgaatgtgcatgaaataatagaccgtatggagtctgttggatatataactcctaatgactttataattaagcagcgagaaagaacttaggaatcttagtaaaggagtaaaattaagataatgatatgaaaaaaagaaaatttgaaatgagaaaagatatttgcagaggtatctggtattctgttagggtacttctgcaatttgacaataagcatgatgcaaagaaattaattcattgtgccggattgactaaaagtaactgtttggaactggaatcagattttggtttagtctgtcaaaaaacattagattttattgattatgcctttgaggaagatggtgtagataactgtagtaagtgtaagcattactatattcagcatgataattgtactatgcaatgtcattggttagggaagcgaatcacaccgagaaagaaaccttgtaagcattatgaagtaagagaaaatagtgatgggaaagcaattcaataatggaatatggtctgccgttcagtttcttgtttgttcacacaatgaaactgaactggctaaacaggtaatagaagaatcaggcttgacaaagaaagattgcctgaaatcccagatggaatcagattttgaatctgaaaccatgttggagttcatcaactctgttttccctgtcgttgatgataagcactgtagccagtgcaagcattatgaaatttgtacgaacttcactatgtactgtcgtatgcttcaaaagcgaatcacagcgagaaagaaaccttgtaagcattataaaatgagaaatggtgtatgaaagtaatatttgtaattaatacttttctgtttagaatgagggtaaaagcaaattggaatttaccgcatcttccaagaataggtgagcggatttcacctcatgtaataatgtttcaggaagaatttacctatcataatgtattaaaatatatgacagaggaagccaaaaatgattttaataaattcaatgataatgagagtgatttggaaggaaattttaaagcatgggtatatgatgtcatttgtgaggctaatataatagaatcaatacattatgttacaagtccagagaattatagagaaatactacctgaaatttatttaagtgattttagaaattagattataatagatataataatggtatgacaaagcaagattttataaagaagtttcctgatgttaaggtgcagcagtttgaaactgatactgtattgagtaaacaggaaataaaggaaatggttaagcaattcaccaattcacttgatatgggactgatatattatgagcaatgtggttgcaatgttactgtttttacctctgataaaatgaagtcggaacttaataagatgaagcctggctatcaggtgacagatccgaacactggagaggtcggaaccattatatctgacagattcattgtttgtggaaactactgcgttagagtaaagttcccatccggtgaagatgtctatgattgtgatttctttgtttaatactaaaaatataatggaaatggcaacaaaaattcaaattgacgtaattggaaaaatagaaggtactcaatttatgaagtgtaagctatatacaaatgaaaatattgtcattatcatgatgaatgaatttgattatgaacggttgaaagaagaaggaatcttcataagagatggcaaaagtcgagattcagccggggtgttgaatacaaccaatactttcatcgaaaaaaattaatactcaaaacaaaaaagaatgattatggataaaaaagaaaagaattttgccacatacaaagaatttgcaaagatgcttcgggaagtggcaaacatatactctaaactgggtgacgaaccattgttgaaagaaggatatgagtataacgccattagagatgctgttcagtatgtaacgaacaaacacgattttggttactttatacagccttggaaggatgagtttctacgtatgccttttgatgtgacgaagcgaaaaaaatgggctgattatgtggctgaatgccatgctacaggaaaggaaatagattacgataattatgattgggataaatgaccataatttttcgaatagtgtgaaagggaatagatgtcatataatcaaaatatagatagaatgtttattgaatataaggtatatcgtagggtgtcagatttgaagccttttatatctagggatgaacttccttcttgtcagatgattgggaaaaaaaagtttgtaggaaaaaaagcaaaaatggaggctgtttatagacttacagggaaacgtttgccagaagactatacaacagagcaggtaaacaattttcttacggtagagctttttaatacgtctttatggcataagtatagaaagatttacaatgaagtttccaatgaaaaagaaattgttattgagaattatagttatcaatatacattagttgtagaattagcaaataaatcaaatccaccattggatgaagggaagataatacattttgttatgtgcgaactattaggaaatccttgtgaaatgtataaagggatgaaaaaccctataatttctttacgaaaagattatgatagataaagcaaaaacattagatgaatgctttaaggaactaatccttaaaagaggttggtctaaaaatagtccatatgaccgccgaactgcatcaaggcataaaaagttattccttgaaggagcgttgcctgatgaatttaaaagaatatatttgcaaagtgctggttatacaatagtgcagccggagctttggcgacaggaattataaaacagagaaaatgaactggaggaacataataagaaatctattagaagttatcattgctatatttagaatgattctcatagggctattttatatagccaagtttatgtttatgttctttattctacttttttttggtgtattaatcagtcaaaataataagcgatggtaaatagagaaataaaagcccgaaaacgtgcggtgaaagaagaaaaagaagaaatagacggtgagattgttagaattagaaaagggcatcctcgtacaaatcttcctgtggaactcccagaaaatcccacatggctgaaacaacctaatgtggttacattaatggctggtgattttaagacagtacagattagaatcttaatagctgttatagagaaattacagaatgtcatagaattaagtattcagcatctagataaatatggtacatctattccatgcgagcaattatccttatttcaagaatattcagaccgtataagagtagatattgcatatcgggatttgggcgttagtccagaccaatacaaggaagtaaaaagtatggttcgtaaattaatcagtattcctgtagagtttgatgtcaaagaccccataacaggtgaggaaagttggtctattactggtttatttacaaaggcaaatatacctaaaactccttattcaagaggtttttctttagaaatggatagagaggtcgctaaagttttcattaatgttgatagaggctttacacgctatataaaagagatagccttaagagcgcaaagtagatatacaataagaatgtatatgctgattagttcgtggaaagaaaaaggtggtttctctatttatgtggatagatttcggaaattcttaaaactagaggataaataccccgagtttaaagatttatatagacgtgtaatacgccctgtttacgaagatttgtttgaacaggctgattgctggtttgaaatggcagaagtttatcgtaattcaggcgatacacagccttataaacttaatttcaaagttattaagtctgcattatcaaagaaggaagaagaactattaaaaggacaaaagaagatgataacgaatttttgttctttgcactttgcaatgaaggacgaacatttgcagcagtttattccacagattaccttaaacaactataaagcagtagtaactaagatgctttatctaggcgaatatgttagagataactggaataaaatttcaaataaagcagaatattgtttatccgtattattaaaagaggtagaaatactccccggaatgattggagaagaaaaagaagatgaataaaagttgggtttttgtccctatggatggtgtaaaagttgggtttttgtccctaagaagttgggtttttgtccctaagaagttgggtttttgtccctaagaagttgggtttttgtccctagttttttgtgactaatcgttgatttttaaatagttaccttttcattttaaagggtactaccatcactagctgataaaaaaaacctgataatcataccaaacacaaaaaaggtacttttcttatcacctaaacctctaaaaaaggaacttttcttattatcttaacacaaactttagggaaaagaatatatattaactaaaaaaggctccatatgatataactactcaactgaaagttgggtttttgtccctatctaaaaaaagcgtattttaaaaagttgggtttttgtccctatggtcttttgatataaaactatagggaaaaaaacaaagagaaaacactatatataaataatatatgaatatatgaatatataaacatataatatataaacctataaacatataatatatgattaatatactctacttccagaaagagcaacacgaaaaatcttcttttccctaaagttccttgtgtcgtttctctctatacttgaatacaggaaaacggctgcatcataaaagaaaagacaccgacaccatttaggaactatcgcccatcagcaaaaggattgcatctaattgataccttttctgccagtactggagaaaagccggaaaggaatttgataccgtacttttcccggttctcccggacatggacgaaaaaagaacattattatgataccaaaaaataatcttatagtattcttttcccttttgtttggtagggtgtttaggaatttatatatttgcgtttgtagaaattaatagcaagatgtgtttttgtgtccacaaaaaccaaatcttgcctgataaatcaggagtttagccccctcgcaacttgggggcatatattatttaatatcatagtatgaaagcaaataaaagagatagaatagtgaaagttcgtctgacaaatttagaatatgaagaactaactaaagcttctaaatctaataaatgtatgtcagattattttaggcagagagtctttaggaaaggagttggtcttattgaccctaaagaatttattcgttcaatggatgaaatttgtttggaaatgaaacgtataggaaataatataaatcaattggctaggtatgtaaatattcataaggaagaagttaatcaagaggttcttaatgaggtagaaaagaaaatggcagagtatgtgattatgcaagataaattgaatgttacttggcgtaagttgatgtcaatcaaataatatatgtatatataatattgatatatataattttagtgataaagatagcactacttttcttttccctaaagttctttgtggcgtttctctccactcttgaatacaaaaaaacggctgtaacataaaagaaacgataccgacaccattcaggaacaggaactatcgtccatcagcaaaaagacattatctaattgatactttttctgccagtactggagaaaaaccgggaaggaatttgataccgtacttttcccggttctcccagacatggacgaaaaaagaacattattatgataccaatactttagggaaaaatattatatatataaataatatatgaatgtataatgtttatatatttattatatgaataaattatattgaaatattcttttattgaatatttgtttgtatatttgcggtgtgaagttataaatatggtagtagtagttttaaaagcggcaacttctttcgctggtattgattataatgagcgaaagaatgaggaaggcaagagtgaacttcttgttgcagaaaattttgctatgaatccagataatttgaagaagtcggattatatagcttatatggaatctgtctgtaggactaatccagcggtcaaggcaaaacaatttcatgcagtgatttcatgtaaggggcgtgaatattcggcagaggatttgaaaaatgtagctttgcaatatataaataaaatgggttatggaaataatccttatatgatatattttcattctgatacagaaaataatcatgtacatattgtttctacacgagtacagaagaacggacagaaggtaaaagataatatggaagctgtgcgctcacagaaagtcataaatcaaataatgaatgttgatttagctttgaaggctaaagatgatatttcaaaatacatggagttttctttttctacagtgcagcagtataagttgttacttgaacaatcaggatggaaattaagagaaaaggatggattattaattttgtataagggtggtgaaaagcacgcttcaattcaattagaacagataaaagataaagctaaacgatatacacctgatgaagaaagaagaaaacagataacagctcttttatttaaatataagcaaggactttcctatacagaacttcaaactttgatgaaagataagtttggtataaatttagtctttcatacaggaaaaggacatactaaaccttatggatatacattaattgattatagaaataagagagttttgaaaggtggggaagttatggatttgaaggaacttttagtagagcctaataaacaagcaaaagtagaacactgtaatagtataattaatcttcttttgaaagatggaacaaaatatacaatggatagtttcaagaaatcaatgttagattacggttataggttttcaatgaatggcacaatatttataaatggtgatgataaggctttattggttcttgataaaaaactgctgaaagaatttagatataatagcagagtgtatgaagcaaataaatttaatgttgctacagttaaagaagccgagttgttaagtagaatttatcatgtgaaaaaagatgatattttgattcaagagcatatggataaaaaaaatactgtctattctgatatgataaatagttatttggctcatagttcagatttacattctacattaagagaaaaaggaattctttttgttgaagatgataatttagtttatctaatagataaaaagaataaagtaatcataagtactgatgatttaggaatcaatattataaaagatggctatagtaaagataggattactctagttactcttgataagatggaaagaataaatgttgaacaagattcagaactggcaaggggatttaatctgattgatgctatttgtgatattcttagccagcatataaatgtacagcaagataaatctcctaacaggaaaaagaaaagaggacagcaacaaaattaattaataaatagaataagatatgataatattatttggaaatcagaaaggcggttgtggtaaaacgactaattgcatacaatttgccaactatctagtagaaaaaggaaaagaagttctagtattggatttagattttcagcgttcattatcggatagaagaaaagaagatattgcgacctatgataatgaacctaaatatgaggttatacaaaccgatatatctaatgttgctaaaattattagtgattttactaaggttgagcaaggaaatctattaatagatttgcccggtaagattgatgatgatgctttgggaactattcttaaagctgcgaatataataatatgcccatttaaatacgataaatttacaatggatagtacaggcttttttatccaagtgttacagtatttaaatgtaaaagctaaaatattctttttgcctaacaatatgagaactgcggtaagatatgagacgaaagaacaggtagttgatattcttaagcaagttggttttgttacagatgaaataccagcttctgttgcgatggaacgtataaatacattagcaattagtaatgagtgtattgataaggtgaagaatgcttatgattatatcattcaagaaggagcaataaaataaaatattctttttatagatatttgttataaaattattcatttattgtatatatttgcgcatggctgataaattaaggaaaaagcaaaatgaaggcatttctagtgttctggaaatagctaaaatgataagaggtgaagaatcgcatgggagtagtataaatgaaactcctattcaagaagctaaatgtgaagttgaagaggagaaagaaccacctcatgtagaaatggaaacaacttcttcggaagtttttaattttaatggctctagtgatatggatttgacggacttattagagtacattaaaggaaaaaattataattgcaaggaagttctatatgttgatacagatgtaaaagaggtgtttggcttgctcaaagctaaagccaaaatacctatttcatctttagtttcgtttattttggaagattggttaactaaacaccgtaatgacataagttctttgattaagcaaaaaaagaaccgttttctttagtacagaaaaagggtcgttttgtgaaacaaaagatttttggttaggctatagacccgtccaatgggcttttcctcattggacggatattttagatagaaacaataatttctttagggattcctgtataatatgctattttttctacaggaatattatcttctctcatttttattataatatcaatattttctttagtaatagaagaaggtataaacgtaaataaaatgtctgacaatttgcttatagccttaataactttttgcctgtcagattctttttttaaatctattccactgaaagttgaaagtttatcatgcaaaataagataatatattccccctattattagtgcagatatagtcacaatatcaatatctgtattggagaatatgtttgagaatttttggcataaaggtaacgtatgcaattcccgtagttgagcggtacgttgactagtttcattgttattagctagttcccattttagaagttcttgcatgattttattctctgataaagattgaaataagcctacaagaatgttcatatatagtgctttatcgttactatattgtttttgtgattttacaatatcgctaaaccaatagtcgtatttttttacatactcgtcaatgaacttattcaaatcatcatatctgttatagaattgtacaggctcaatttcagcttgtcgcataatacctgtaactgttagattagaaaatccttcagtttcaattaaatgggttgccgcattaataatgctttcctttatgtctttggcacttcttcgctttctcctttctttcattattattttatttttatgttcttatttatatcattaagagtattgactaaagattctaattgttcaagtttatgcgtggcaagaacgctaacccttaatcttgcttctttggttcttacagctggatatacaattccaattgtaaagatacctttttcttgcaacattttagcaatttcgtaaacctttttattatctcttatcataataggaaaaataggggaaacagattttcctatgtcgaacccttcttctttcaaccgttttctaagatagttcgtattatcccaaagtttggttcttatttgtggctcttttttaataatctctaaagcttttagtatggatgctgtgacttgtggggtaggggctgctgaaaacacattgctgtccgcataaaatttcaagtattgtattatcttcttcgaagctgctgcaaatccccctacgcaaccaaatgacttgctgaaagtgccagtaataatatcaatttgacctaaacagttatagtattcagctgttcctctgccattggctcccattactcctattccatgtgcatcgtctaacatcagcatggcttcataagtcttgcaaagagtaataatttccgggagtaaagacaaatccccatcttgggaatatacaccatctattattacaagtttagtttgatattgccctttgacttcttttagtaccttctccaaatattctaggtcgttatgcccaattcgttttatatttgttccttttagtccagccattgcgcttgtgtggatataagggtctatcaatgcaatatcattttgacctaataaggctcttagtattccggcatttgctccaaatccggaagaaaataaaatagcttcttcttgtcctacaaaagaagctatttctttctctagctgttggtgtatgtcgagataaccgcctattacttgtgcagcgcaagcacctgttccatatttttttatagcatctatacctgcttgtttagtttcttctctttgtgacatacctaaataatcattagaaataaatgcaataacaggttcattgaagccttcaattgccattgttgaaccgatacctgtatgtgaagttatccaatagcttttgcatccgaaatcatttaattgctcgatgtactgctgaaaatcatttgctctctcaatagcattttttccataggatagttcaaagtcttttaatgaatgataagtcttttccatattagtataatttagattgtatattgcaaatatatattataatttatgttcttgaacattaagggataaaaaatgttcaaaaaatatttcttatatacaatattgattgtatatttgagtgtgttaacaattaaatatttaaagttatgcgtaaatcaaatcttaaaattggatggctattgtttcttccttttatgctgggttcatgtagccaaaatgatgagttcgacaaagaagatgtatcaggtgctaaagaccgaaaacttcttgaattgagtgttcctgaatacttaagtattgcttatgattcggagaataatgagttatcaaatgaagaagcaactgatattctaaaagagtttgtgtattctagtgtggaaacgagaggaacaacagcacagttggcattcaatgttaataaagagtattatttaaatactcccaacagtcgaagtcgttttaatcaacctattaaaatcgtagagtttactatagggaatgaaacaagaaatggctctaattctgttggattcgcatcagttgtggctgataaacgatttcctaatgtgttggcatattctcctaatggtaatgttgcagaaattgaagaatatggggctggtataatgatgaaacgtgctcaaaatgtagctcaaaactatatatcccaagtagaacattatcaagattctttaagggatataacggtagaaaaagtatgtactatacttggagtagagaacttttcttttgaaaaagtaaagaactcgttagtattagaggaagataccaaaattgaagatttggataatttgattaagtccagaggttctgcggtaaatccatcaggtacacctattgcaaccattggtccgttaatcaatgaaagattacagtggatacaaggttggccgcaaaatcaatttattaaagaatgttctgaagatgatttaaattattggccatccataaattatggcggaaaatatcctgctggctgtacggctgttgcagctgcatctatattaacatatttaaaacctacaatttattccaatgatttaggacgaaatgtagattggagtactgccttaagcaatcctgttatagattggttcacatctgcgacagatagttatgtgattgaagccgctgctatattaaaagaggtttcagttaatataggaacaaagtataaccatgagggtggttctgcatcggcagaaggagtacgttcttatttcggcaaacttggtatagctatggatgcaaagagcgctcttaattacttcacaataagaccctctataggtgcatatagaccagtattattaaccggagcttgtcgctctatttctcgtgcggaatatactaatggtcgtcatgcgtggactatggatggaataaaaattgtgaaacgaacagttacatcaagaatagaattagctcaatataataactatggttattgccattttggatgggtctttggcggtggaaatggttggtatttgtttgattcggatggtggtataacttttgattatggtggagataagtatgatatagaccttgctgcctatcctaatattagaaaataaatataaaaacaaattcataagacagatttttataagtctgtcttatgaattttatctattgaaattaataccatgaagaatttatttttacttgtttttttgataataacttcttgtaataatgtggtagatataccacaaaatgaagaaaattctgttgaattaacttatgaggaatttttaagtatagctaatgaatcacatagagaacttacagaaaaagaggttattgatattgtggagaatttcatgaaatcctctggtgagcttaaatctcgtactgctttaaatcccaatatgagggtagagaaaaaatcatatgttgagtattctaaaaacaaaaaattacaactccctttatataatatagtagttaatagtgctaatttccaagatatagcaatcgtttcaggagatagtagaataccttttattcttgcatattatagtgttgataagaaaaaatcggatatagaccaacctgactatgatatgatgctcaatatctcaaaagagatgttgcttaatgagctaaatagtattattggaatatgtgattctttgtgcgataagactaaattaaaaatatctagaaaattaaatatagaaaaaaataagattcgattagctgatattagttcacgtatcttaataaaagatacaatgaatacaagggctaatatgataatagattcttcaacaatacctgggacagttataggaagattcggtccatggtgtgaagttaaatgggatgtaggaatgccatataatcggactatgccacaagaatgccctaataattggttatgggataatcggtatgctattagttctgttgttgtggctgttgcacaagcaatggcttattttcaacccaatatgagtgtttataatgaaaatatagattggagttatttaaaggagaatgaagaaatacatgaagattctgattattttggtcagtatgtacaagaccctataagacgaagaaatatggttgctaatcttatgaaatatattggggaacaatgtggggtaatttataattgcaatggggcatctgtaaatttctcaaatgtaattaactttttaaagaattatggtatatcaatcgatgggaaacagaattttgatgtggcaaaaatgactcaatatattgaaaatttgaatcctattattatgtatgggcaaacaagtacaaacggtgggcattggtggttaatagatggaatgatagctgttatgtcagataatcaagttataaataaatatgttcatgctaatatggggatgggaaaatcatatacaggattttattatgtttccagtggaatgacttttgatgcttcatttgctcatttcactaaaaatatatgtatgtatcctaatatacgtagatgatattttccctatagttttatggtatcaattttttgtgtccggcttccagcagctttttgtaattggtatcaaaaaggagttcttcagggtgtaccaggaatgataattcggtatcatttcatcatgctatatacgcccatcagtgccggaacttcaaaagaataggtatcacaaattctttaaagtaatattggaaaataaaagagagtataaaatactctcttttattttattagggctgtaataaattgatggctttttgaagattagtttctagttcttttttagcgtttgacatagcatcttcatagtttttttctgattgtctaataatttctattataacagaattatagttggctttttgtgcttcatcttcttctgtattagaaatcagatagaacttttcactaaatattaaatctataaaaacatagttagaataaaaattcagcacttgaaataaaagttttaggctgcccccttttcctagttcaagatttgaaatcgcattttgtttacagtttagctgttctgctaattgagcttgggaatatcctatatgctctcggatttgctttaaccttgtgcctaaaattggtaatgttatgttatacatattgttctattactgtttctacttcgtcgtatattctcttaaagtttttttgcagtaatttctctctattatctgctgtcccaaagttatatacttttggcagttctttgtaggcttcttcttctttcttaattttttttaaatctaaattggttttgcaatggtacattgctgttggaaaattatcttcttgtccgaaatctaatgcaacttgccctactaatgtaccagcctgtaatgaagaaattttggatgccgggataacaaaatccatttgttcattcatattaattgttgtttcgtttcttctgatggtaacaccttcttttacttgcttaacttttccaaatagtttttgtagccaatctaaagtttcaggagctttagcttgcccggataaagtgttacctataatagaagttatagtttttgcggtagctttgccgtattgttcttctaattgcggtagttcctgtaatcccaaacaaattgaaaccttattgctacgtgcagtagaaagtagtgttgcaagttgataaaaatataatgtgggacattcatctactatgattgaagtaggatagttaccttttgtattgacaagtctagttagtcggttaatgataagtgcatttaaagcactattcatgctttgtgttttagggttatttgcaatgatgagataactagggtcttttttatctgatacttttaaattgaaatcattgccactaaatacccaaaaagattctttagttgccagtcttgataactgtacttttagacttgccatctgtccttctaattggtccacggctcctgatttatatgcagcttcaaatggggaaactagtgattttaattcaggttcggaaaagaggactttaaaaagtacatcatattcttgattaaggaaagccagtacatgcggtaaatctgaatatttgccattctcgtatctagaccaaaaataaatagaagctgctaacaagtttactgctgatgttttaaaaaaatcgctattacctccgcttcctttgtcgcctttttgtaaactctcatataatgcttctgccgtttctgttgcatctgctaggatttctatatattctcgtttcaatggatttatccttctactatattcaatatcagaaaaattaatgacattgaacttgaaattacttggtattttccctaattgcttgttcctttgataattataatatgcaattttggcaagttcaggaaatttgaagtcgtaaacaacttctgcaaatcctttagctgaatgttgtcttataaaagaatttataacagaaaaagatttaccacttccgggcgttcctattacaaaagttccacgaaaacagttacatatattcagccatccattatgccactttctattgtagaaaaacttcatcggaatattgacagagtattctgtttctaccttgtctttagattgttcaaagctttcattctctatattaaatctatctttcataaagtttgatttaatacgtttggaaatgttatctagagctgaatttattaatgtagctccaattatcgatagtataatgtaagctatattataccattctaaactagtttcttctttttctttaaagaaaagaaagcatatacttccaaagaacattatgaaaccaaagattaaaggaaaaatgatttgtttagtcgggtctaattctaaatccttttttgaacgtgttccaatgcaagtaaccattataataaagaatgtaaatagtttactataaagaatattagaatagataggaatttttgccatttttgataataagggcataatttgttcactaaagggaaaatgaacaaatagtagaatctctatgcaaacagttatataaatgaatgcttgcatgaatccatatagtttttgtaattctttgctttcttccatgatttaatcgggtattttaactttttcaggttcctcacattgaaaagccttgaaatcttctatagctaatttcaagtcttctaaaaaattgctattgcaacctttttctactgctatctggtaatatgcttccatcgcttggacggaacaaatatctgttccgcatattacaaaagctggaatgtcttctaataggcacttgtgtaataatcttttttggtctttcatcttattaattcaaatgaaaataccactcttttatgtagtgagagtggtattggtttttatttttgggtatcataataatgttcttttttcgtccatgtctgggagagccgggaaaagtacggtatcaaattccttcccggcttctctccagtactggcagaaaagatttctttggcagcttcttcgggagcttcggaagaaatatctactcctactgtataatgtattagaagcttgaagttttctgggtcgcttacggtagcttcataacgcacttttcctatatctcctgtaggtggagtatcagggtcgttgttatcgtctttactgcatccagacaacataaggcttaaaccaatcatcgctaatgataaatactttttcatattgtttcttttaaatagttgataattcaatgtgtatcgttccatttgcagcattatatgctacttcctcaatattggtgaaccgtcttattgattctttccattcttctatttgtggattgtggtaatattgttcttctaatagacttatcaaattatcaacttgtttgttagatagataaatcttttctccaacccttggaactacaggtaattggattggtatagaaatattgttcacaccatctataggaatatggatgtttatttctatcatagccatttcatgtttagtatatttttggaaggcttaaatttaacaacttccttttctggaacttctacaggttctccagttgccggatttctagctatccgagctggctgaataatcttcttgaaagtaccaaaatcttttatagaaacatctttttctcttagattttgagataattctttaaaaaaactatcaattatttctgctacttcttttgttggtttatttgccttttcagcaaccattttgattaaatcagtcttattcatttgcatatcaataatatttaattacttaaatcacttaaacaaatttcaggaataatttgggtatagtcttctgtatctggtctataatgtattgattcaacaatattgacctcacagataacatcatatacccatgctttaaaatttccttctaaatcatcctcaccatcattgaatttattaaaatcacttttggcttcatctgttagatattctaataaattttgataggtaaattcattctgaaacattataatgtgaggtgaaatttcttcgcctatccttggaagatgcggaaaattccaatcaccctttacgctcattcctctctctttaaaaaaatggctataaattataaattttattttcatattagttttattttaaaatcatcgttcagtacaagctttctttccatcggttgcccgtttttatcacgaaatccagttaacacaggtgtttcttttttctcgcaaagttctattgcttcttcgggagttatagaacgtcctgacatttcacgccaaatgacaaaatcacattttatgttttcatttctatagttggaacaattataggcttttttgtttatatataagtttcctccacacttaggacacttacacaatgtattatcaaaagaaatatctaagttctctgttagaaccagccgtgaagaaaaatcatttccttctcttgatttaaatccagtcataaacggtgtttttttacctttggcaagtatttctgctgcttccaatggtatttctctttgtgcaatagttttgggtatatagaggttacaaactctgttgttgtccttgtccttttgcgaataccctttacaagcatatccatttagtaaaatttcaatttctctaccacacacaggacacggagtttctaatacttcatttacgaaagaaggaataacgattccattttcgatagtcagatatgcagaaaaaggaactccttttttattatggaagtcatgaaatatatctgttttccctgttgttattaattgcctggctatttcttctgtaatctcttttccccaatatgaatgataaatattaaatgtacatttgtcattcatgtttttgaagtaattacaggaatatcctaaactacctttcattatgtgtcctttctggcaaatagggcataagcctaaatctttgattgtatcattatccatttaatatcctcctttactaatccatttaatgccgtttaaaatattatctactttttgtttcccactatttacatatttaaattgtccgggtacaagtgtttttagtactccagctcttttagcggatttcatttgtcggcatacagcgtatgcaagtcctcgcattcgtctaagttcattgaccacatgaatacataaatctatcctttgcttattatccataagatttttttcaccgccttgcaatgctatattgtttatgtatatcattaaatctacacttcgactgataagttcatactctgtttttgcaattatggttaataatttggggtctccaactgcatatttagctgcttcggattgatacttagctatgtctctagctaaggttgaagcataaataatatcctttccatttttcacaactgcattaactgtagaaagatagttgtatgtcttttcctgtaaggattgaatttgactcattttttgttgaattaaaatttgaaagttacggatttttgtttcctcactttgtatatctttcagtacaccttgttgcgcctgatgggaataaaccaatgttccaatcattgccgggtcaatgacaatagattgtgctagtccttttatgttgcccaacagtaacattagggaaaaaaataaaagcactcttttcatatcattatctgtttgtaaattcatatattccttttttctttttttgttcttctactctatttctgatagtttgaattatgtcactattagctttaagaccattcatcagtagttctggtgttgatttatcgccagaataaatgtagatattggtgttgtttattaaagactggataaaactttgcttttcttcataatcatatacccgatataattctatgtagttaatcctttttgaaagtactccttgatatatttttatttgctctctagttataatccattttgtacaaagtaacattgaaatatatctgtagaaaattataaatatcaacaatactaatatcgttccactgataaattttaataattcatgttctcttatatatttactaaaaatgaacacgaaaatcgctaatgtgattaaaaggaaattcttcattaaccaatatcggaatttaggctttaatataatatcatcagaagctatgtttgttccatcattcataacttaatactttttttttgttcatgttgtttcattagaatttcattgaaatcttttgctttttctgctttatgagaaatcataggagctattattttgcttttttccctaaaactttctagtgaaacgtcatttttgttaatagtgaattctctacccttagttttaaacagcacatcatctttattttcttttattgtcacttctgtattactaatgattccagacactttaatgtcatacaaattaccgtttaaatcattatcaaaacaggtatgtactttagcttgtgggtatcgcaataaagtgttttttatttgattaactgaaatgtaccctcctacactacaaaaaacactttcttctaatttgattttgttagcattgagctgatagaagctcatagcatctaaagcggattctgcaaagtatatatgttttgccatttgggggtgtgggcaaaaatcagcaatccaaagcgagttacttttatctcctccggcagccattcctttgaatccatagtttcttaattcgtaatttgttactttgttgtctttatctgttggattaatatagggaaaacctatattataataattgccgtttccttgtaagtctttaacccttgtgataaatgggagaaacttctctacgacttgatgatttatatttctttcatttgtgagaaatcttaaatcagcgagtgtagtaggaaattctttatacctatctctgtcaaaagatttgttttctgtttttacaactttgaatgcttcatatttaggactataaggctcatttgcgtaatgtcctaaaatcatattaattcgcacaaatgtattttgatgttggaattgtgggaagtcgttaatatgatttttgatgaactgaattaaatctccacctttataattcctatcatagtagtgttcttgtacactatgaggattcttgatgatgatttcatccaacttgttacctgctccgtctgttagtttaaaaacaggcgaaacctttcctttgctaatgtcttgtttatatcctaaatcttcaagtatttgaatgatggatattttagccttataatcgtcaaatgttagcataatattatagtttcattgttggagtatcattattttttccgtaggttctaccatatccgagaatagatgcttcttgcttcgctgttgctttaatagaactatctattttatctatctgggtagatatttgttctccgacagtttgtttagtagcttccctagagctggaatatgttttttctacttccttgtaagaagcataatccttagaaagtttatgtttctctaaaaaggcagccatttcggtgggtttatctttaaatatttcatcaatccctttagctcctttttgggctacaaactctaatctttctttatcagatatatgtctttctttccctattgtttgttctttcttttcagtcgctttaatttctatagtatttgcatctttgattgataatccatttctggcattcaaatctagttttacttttgcagctttgtttagttcctcgtttacaatggtaatttcttttccatttttgagattttcttgttgcataggagttagctctactcctccaagtttttggggaatatgaatgtcttttgcttttattgatactatttcattagtatctttgtcacgttggtgcaatgttctttctccttttgaattagtctttactacgacattatcagcttttagggcttttatttcatccttagtaaaggataaatcattttttatttcttgtcgtttaggaatgagtaagatagcaatcccagcgattgggtaaactacagtaatagctgcgattgctagttttctagcattgataccatcaattttgatgcgtttaccttcttctttgaaatcaatttcgttggcttttaatttagatttattttcaggtgtattctcggctgttatatatttaagagttgttgctttcccttcaaaatggagtttcccattttctgttttataagacactttttcattgtctagaagtgttctattatcaggagtatcttcaatagaaaaatttagcataccagtttttttcccatttctgatatttgcaatatcttcggggcttaaattttccggtttaactcctacttcattaaacttgttccaatctatatcaacatatgaacctttaccatctagggtttggttttgttcataagcatatcgataaaggtcttctcctttatatgcaattttattttcaaggtcaatgactgtaaatccgtctttatatccttcattcttattagcaccttgttttatatcatcccattttataattgcaacattgtggctttctcgtaaatattggctatattcttggaaattattgctagcttgttctttatcaaagaaactgattattctttctttagattgctctaacaaggattctctattatctcctaaattgccaagtttaagtgtattcagtggataagtatatgtttcattacctttggaaaagataatatcaccatttcgatattcttctgaatatccaagaactgctgctatggctcggaattgtccggcattttcataactatattgcagggcttcaaaacttttcttttcttccattttataatttgaatttatgttctactttagattgagattcatttccaagtgacggcttttgtcctttcatgtattctatatattcatttctgtttttatcagtatgaatagttcctataatttgtgggttatgccggtcataagctattttctgttgctgctcgaagtctaggaattttattcctcttggattatttaaatctaatcttatggcaattttttctttgtcaacgtttaaaatcaattccttacctgattttagagtttccttttgttgcttatccagctcaacaccttttatgtttgaaggtattgaaatgcttttgatttttgttttaagcaattcgtttgtttcagggtctaattgtacaagatatttttcattgttaatagtttttgttattatttcgttatcttgaagtcgttctaactcctttggcttaagatttatatcattcattatttctggtctgactggatgaattttaacgccagcattgttactgtctttccagtacaaacttatttttcctttcatacttatttcttctccattgttatcgtgaaaagaaaggtctagtaaactggttctctttccagataatagagctgtgatatttgccttatccaaagaccatatctgcttttttgatattcctattagttctaattctttatatggaatatcattttcattaaaaatagcttgctttttatccatgtaatgtatatttttgctcaaaagtaataaaaatatcaatatgaagaataaaattatcatgttttttgcttattcattgtttttttcagtgaatggctactgtcagtttaatacggtattacagaaaaaggatattcctaaagcagaaccagtattagcaacgacagaaaataaattgatagaagaaaaagaaaaggctgttgtcgtcaatgatgctttgactacagaacggcttgcatactggaagcaaagaaggtatttatctttgcccattgattcaatggtgataacttcccattatggtaaaagaaaagacccatttactggaaaaatagcaaatcatagagggatagaccttaaaggtaacaacgactatgtttattcgataatgccgggaatggttgtaaaaacaggaaaaaataaagggttgggcaattatgtagaagtgcgtcatggtgattttacttctatctatgggcatttatacagtgtgcttgtaaatgcgaaacaagctgttgaagctgggcaaccaataggcattagtggaagtaccgggcgcagcacaggagaacacttacattttcaaatggaatacaaagataagactatagaccccaagccaattcttgattatattaatgaggtaatcagaaccgttaaaggacaaatttcacagcaaatagataatgagttaagacgcaaataaatagaaagggaggattggaaaaaccagtcctctctttttatttgaatcagaaaaaacctttttttaatcctttttcttgtctttgaactttttctaatgaagattgaagttgtgacagagcttctttcattcctttttttacttcaggattcgtgacggattcaataagttcttttcctgtttgaatgttagtcttaagtatttctttattcttcatctgttttgcacgactttcatctataaaaatagatggcatacttttacaactccattcaccatttactaggttaaaatctttaattctttctttcgctaagtaggtgtggatagaaatcttatctacagccttgtcactgtataattggtttgcggatttcattagtccatttatggctttgttatgtgaatcaatgtcggctaatcttccttgtcctttacttagtacttcttcttgatacctattgtaaagtcccagttgggtaaactccttgggagctgcaataatatatgcttcaacagtgaaccctgcatctttaaatttttgtgctgtctttaaaggtacatctggatttctcatagttccttctataataatattgcatttccgtttaatggcttcttctattagtttttctgtaaaaacgctagaaaaaatctgggtttcaatggggtatttaatagggtcttttattagttccttattggggtgaaactgtctgtaaaggtcaccattaacagtgagaaaatctaagttaggatggtctttctttgcaacatttataagagtgctttttccgcaagctggttgtccacctaagattatagcaataggcttttgtgatgatatattgatgtcctcaaataagccatcttttttttgttcaaagatggcttctacttcatagcgttgcataatatgctttcaatttaggtgcgtaatagttttgtatcttatccatgactgataagcgcacattttcagaaacttcaaactgcaacaatccatttgctattttttcttctgtgttgagaacagaaagttctttttgcagtattttttttctgttttcatccttctcttctgatatttcatctatcttcatcatgcggagtgtcccgataatgtcgagcgcaacatccaaactcatttctttattcatggttcattatagttttatgatttatacttcaatagattctgtgaattttaataatggaataactttcactgtatgaaatgaaagttggttaaaaagcttatgggtctttagcatttcaatcgctgcatcagccgtaacaacaccttgttcataaagccggattgttgcatataactggtcattggcaacgggtcccattattaaatcatagctgttttttccttttcctctgcggttattaactacaaactccagccactcttttgtagccccatcaaatcgaaggactgaaaactctctatcaagaatattatcggggacttcataaactgaaacgacagcttttttaccatgttcccgattccttttgagtattgcccacttcttagcctgttcaaaattagttgtcgtatagaatccttttccaaagtcagtagctttacgccctttctgtatattaggggatttgacggtaactgttgagccgtgatatagtttcatgcctttttattgatataagttattatagtatctaatatatactctgtatcttgtgtgtgcagcatttcaaaattttcatatagaaattcaaaaacaccatgattggaaaacagcaaaagagtttctttagcacttatatttttagtttccctgtaattttcagcacaaaacatttgaaaaagcaatatctttggattgtccttttgtactttcttctgttctgttttctctttttctaatgcttcataaagtgataatgtacttgaataccacagttttgtattctcgtccaataatgccttgtacaaattggaagaatatatatagtataacgcatcttctaaaggtagcgtttttcttttcatgactgtatcaaccaattctctcataacaaatgggagcatagccgaaccaagttcattttgatatgtttgattagtttccataactatttattttctaattttatatagctatcttgctgatgtatttagcaaagatagagaaaaaacaatcatcatagacctattgtattgattagtttgtaaataggttctttgtatttctttagatttttaatttgtataacatacttattgattcctagctcattaaagatttctgcgtacatttttattatggattttctgtagtagatggttaatcctactattgcaatgcaaataaaaatcaaatagactagttcactatacgcatagattgctaatacaaaaactccacccatagcccataaaaagctacttaaaagaaattttaagatattcataattttgtttgctgttctttatactggcagccaaaccagctttaaaggtttgtttatctctttattttcaatactcaaagatagtaaatttctataaatgtcgcaaataataagacaattatttttgttaaaaatggttttaggcttatagcttgccgaagttttattttcccctaaagtattggtatcataataatgttcttttttcgtccatgtccgggagaaccgggaaaagtacggtatcaaattcctttccggcttttctccagtactggcagaaaaggtatcaattagatgcaatccttttgctgatgggcgatagttcctaaatggtgtcggt

SEQ ID NO: 42 - DNA, 4138 bp, Bacteroides cellulosilyticus
  source 1..4138: mol_type = genomic DNA
ctttgggagtttttaagacgcactttccctacactttgggagttttacccttctttttttgtttatatgtaggtatttcatatctttgcaacaaatcaaatagttatgaaaaagaagctacctattaccaaaaataaagacgtagttgtatcatgggtatatacatggtccaaacagcaagacatgtccatacacgaacaaagaatagttcttcgcatactggaagcgtgccaggctgaactaaagggagtaaagctgaaagattatgcaggcacgaaacgcaaatttgagcatggactttgggatgttgatgcacaaatgcatgtatctgacgttattttttccggacgtgactacaacgaaatcatagctgcactcgattcactggctggacgttttttcacttacgaagatgatgaggaatggtggaaatgtggatttatatctaacccgaaatacaaaaagcataccggtattataacatttcgtgtatctaatgacctttggggcgtgtttaccaaattcgcaaaaggatatagggagtttgaactaaacaaggctcttgcgctgcctacgggctattcgcttaggttttatatgctcatgagtgggcaggtgtaccctttggatatatcactggacaacttaaaagaacgacttggcatacctgcggacaaatacaaagacaaaaacggaaaagacagaatcgacaacttcgaggaaagagtattaaaaccagcaaaggctgcgcttgatgagagttgcccatacactttcaactacgtgaaagtgcgtgaaaacccaaacaacaaacgtagcaaggtgaccgggtttaggttttacccggtctatcagccacagttcagggatgaagaactggaagggaaagatttgcaggcaaaggttacagcacgatatcagatagacagccatgtatacgagtatctccgttattcctgcggtttcacatcggaagagataaaccggaacaaagagacattcataacggcacaagaaaagataaccgaccttatcggagaactggctctcctaaacggaaaatcacgagaaaagaacaatccgaaagggtggattataaacgcccttaaagggaaaatcaaggataagtaacaagattacccggctgaaacactccgggtaatcttgtcaaatcagaggaacgatttccatttctacaccaagttctttcatctgctgttgtatttcctcgctgcttagtttctctctcgccagtgcaagcccatgaaaggcgtcccagcctgccggcttcgaaacgatactaccgtttaggacggcatgggtgatttcgccgccggacttcgcacccttgttcagtatgaagaagaaccggggttcttcgtgttccgttgttcccataattcgtaaagttagatgtttatttattccccttttgttcccttgcctgctcttggtagtattcataatactgcttgtagttgtcccggtctttggctgcatccgtccaaagatagcacatgaaacaagcgaacaatagggagataacagcacaaaggattgagtagaacgaaattcgtttgtccacataaccgccgtttttcattctgtacccctgccgttcaaagtccgccaacacgttttttaggcgattttcggcactttcaaggcttttcccgtctatttgtacctttcgggctgttgcgtcctctatgcgcttcgtatagacttcaacacgctttagttcttgatacaccagttctaccgcaagctgcgggtttacccttggcgttgtatcttttcttttccgggggctgtactgtccctgcttaacgttggaagctgccgcttccgggtgtgagtttgtttccatgagatatgttcattgagttgcacttcagtttgctttgtgtccgctcgatatgggcgagagtgtagcctttccctatctcgcttgccttatactccgtaccgcttcgggctgtgacatagtagccgttaagtttcccggtgcttgccctggcttcccggactttaaaacctctcttaccaagttcttccttgaatttggtaaagtcaaagccctgcatcttcttcaatacgccgtccatggcttccttgatttccgctttgttgactttgccaatgtcctgcgactgtacaaagttccgttccttggctatggcattggcggcttccgttgcctttttccctatccagttgtcccggtacagttccccggaaagggaaacccggtttgccagtatgtgcaggtgggcttgctctttcttgctctccgtaccgctgtgccggatgatgatgtactggtggttcgccaaccccatgcgctgcatgaagtcgttaccaagttccgcccagtccgcatccgtaaaggtggcgctttcctctatcgaggggctgacctcgaaacgtaggcagttgttttttacgttcggaaaatcaatgtgatacggtttcatttcctgcaccatttccgcaccagtacacccataaagttcatgccgggctatctcggtggctactgcctgcccgtttatctctttggcgaggtcgtactccaatgccgccacaccatgtgatatgcttttccctttccctatcatcgtgagagtatttttttgagctctgtaattagtgcccggttctcctcgaacacttcccggtactggcgaccaccgaagtagttgttcagccgttggagcgttcctttcaactgggctatgtcccggagaagctgccgttcctcctcggtgtacctctcccttgggcgccccccaagggacaaactccggcagtattccgatacgcttagactgcaccgggctgcctgctccgcaagtgcgtccttttcaagttcggtacatcggaatgtaatcttttcgttccgtcttagttccatgccacaaaggtaatcttaaaatctttttgagcaaagcgagaaaagcaagaattgtccgacaaggacacttcttgctatatatacacatgccgcatgggaatacatccacaccaaccgcccggcaaaaagcccaggcatgttagaaaatcccccacagccgaacaatttctacccaaggggattacacgccgcagaagtcatccgggaacatgtctttcagttcgtccaaatcaatggcttcttcttcggacacctccacccattcaacgttttctttccctcttatcgcacatgagtacatctcggcggcggcaaggttagagaacacctcgtgcataggctcgccgttctctaaccagtaaacacaatattcgaccataacagttttatcatttatcgttgtaatgcccctctacctccaaaatatagacttctactacttcctcgtaaatgtcatagattatccggtcatgggcggtgatgtgtcgagaccatgtaatatccccaccgcctcttaacgcttcgggatgcccaagcccagtcttagggtgctctaacaattctttgtagattttcttatacttcttgaacaaattggggtttgatttcttccatttggcaatcaccttatccaccccgtcggaaaccctaattgtgtacatcatagactatcgaaataagcgtcaatatcctcactgcttttgagggtaacacactttccggatttgatttcttcccttgccttgtcaatccttgcttgcagctccggggttatcatcaaatcctcacgacctactttcaccaaagcgtaaatttcgtttttccgacgaattaatacctgctcgccattgtctgctttggtgaaagacgctgcgaggttgttacggtattctcttactgataatgcttccatatctgtttgcttttaaattcagcacaaagatagctatatttcagtaaaatacaaatcttttgtacacatttgtgtacacgccataaaaaaccgttcccaatcctaccgcccgttggttggttttgctttgctcttttttccctatcgtttttctttttccgacagtaaatcaaccgcttagccctataaattttccttgtctgttataaacatcgtctgtaatatgctctatcacttttacgaaaacaccgataaacaaagggattaaagcatgtgcttccctacattttgggagttttaatcctaca

SEQ ID NO: 43 - DNA, 2753 bp, Bacteroides cellulosilyticus
  source 1..2753: mol_type = genomic DNA
ttgtttttatggaaaataatagtttactttgtggagaataatatttcccaaaaacacatcaaaatggaaaataaaaaagcagttaagttaaccgattttcaaaagaacgaagaaaatccttttatgaaacaagctatagaaggtattgaaaatcatgttgttaaaaagtataagagtaatagtggtggcgataagagagccgtagtagctttagccgacactgaaactggagaagtgtttaagacttcgtttatccgtcaaatagaagtagatgaagaacaattcactaaattgtatctttctaactttgctgcattctttgacctatcacaagcagctattcgggtttttggttactttatgacctgcatgaaacccaaaaatgatttaatcatcttcaatagaaaaaaatgcctagaatataccaaatacaaaacagacaaagccgtttataaaggacttgcagaacttgtaaaagctgaaatcatagcccgaggaccagccgataatctttggtttattaatcctctgatagtattcaatggtgaccgagtgacatttgctaaaacatacgttcggaaaaagactttagctgcccaaaagaaagaagaagcagagaaacgacaattatcacttggctttgatgaacagtaacactccattgagtgaagctgccgtttggtcgctccccctttgggggcgggggggggatagataaagttcctctatgtaaagttataatgggggatgaaaggcaaggttcgctaaccttaccccgattgtttatgcttcccagcattcaatctatccccgtttatgggtttctctttcaccctacaaagataacctcatgggggaaaaatgtccaagaatatggggtaaaaactatcaagtcggtagaaaataagtatctttgaagtacatttttagtagaggtactggtatgcctagacgaagcagataggcaaaaataaagccgctggagatgtcggatgtccgtcaattaactccagcggcttgtattttggtaactctcccgtatcggtcggctaccgtttggtcagcaacaaaggtagtactttattgtcgcaaatccaaatgttttcccctttatttgtgcatttacagaacatttgctaacttcgcacctatgcagtatggtgatagcacactagcaccctaaagggtgcgtgtgtaaggggacaagcccccttaaccccctgtcagccggctgtcaccggctgttatcgattgtcacaaaaatgttaacttatgggagcaacaagtattcatgtacaagcagtgaagccggggagtgagattcacaactttagggaaaaagagttggactatgttcgtcccgaacttagtcatttgaatgaaagctgggttggagatagcatctcccatcggctggaaagtgcgaaacaaagatatctcgatacggttgggcagaagatgcaggctaaagccgcacccatacgagagggagtaatagtaatcaaacaagaaaccaccatgcaggaactccagcagtttgccacggtctgcaaagaacgtttcggtatcgaagcatttcaaatccatatacacaaggacgaaggatacatgaacgcaaagcaatggacacctaaccttcatgcccatgtagttttcgattggacgcagccgaatgggaaaagtgtgcgtttatcgcgtgatgacatggcagaactccaaaccatagcatctgaaacactgggcatggaacgtggcgtttcttctgaccgcaaacacttatcggctatgcagtacaagaccgaatgtgcgaaagaacagcttcaggaactatcaaacgatatatccagtgcattagacaaacacaaggacgtacaaaaccagcttcttcagcttcagaaagaactacgttccattgaaacaaagaagaacgtccaaaaactcatttctaaggcttcagagaagttttacggcttgattggaaaaacagtcaacgatagggaaaaggatgccttaaaagccaaagtaaaggctttagagggggaaaatgaacagctatccgatagactgggaaaggctatacttgaaaaagagcaaaacggcacaaaggcattcaaagccgagaatgacaaggagtattatagacaacaaatggacaacgcaaggacaaccagtaaccgattaaggacggagaaccaagaactaaagaccgaaaccaaggaattgaaaaaagaacttggtaagatgaaagacttgttcaattccgaacaactggaggctttaaggcatcatttcccaaacatatcaaaagctatggaagaggggaaagacctactcaagcaaatcaccagaagcagaggtttcggtatgggtatgtaacccccccccccgcccccaaagggggagcgaccaaacggcagcctctctcaatggagtgttacgtcgttcggattcggaagaaattttgcagggttcggaaaacggttgtgtgcttattctaaaaaaagtttatggtgtggcgctcgtcgggacgggtggtcccgccccttgccgctgggcgctccccgaccgatgatttttaagtgactgattttgtgctgttttgggggtatattaagaatagaagaaatagaataagttaagtacttgatacacaatatagggcattttccatattggaaattctcattttccaatctagaaaatactgatttcctaatataatactaaacaggaaaataatatttcccttaata
